United States Patent Application Publication US 2017/0298453 A1 - sequence listing, part 2

SEQ ID NO: 67 - DNA, 306284 bp, Homo sapiens
tttgcatatggtatgaggtaagcctccaacttcttttgcatgtggatatctagttttcctagcgctgggtaaaggtggaactcctctgcaagggaggtgaggaaggaggggaacagagaaaggtgtagataatgaccagtttacttttgttgaaacctagttacttcttaagcaaagattgtttaagtggatgttttcaaagctgcttgttactgtttcaaaggtcaaatagataatgattaagttgcgcatcacttaaggtagattttgacctctcacaagttgaagagtactgaagatctaagatcatttacatccctctggaagaaaaaataacatagccttctagggcaaagaagaaaaaactcaacagttacaggatattccatggttcaaagtacacctgcctggtttgctgttctccaaaatcccatgctcagttggttggagtggcctcactcttacctgccaacctgggaggttgatgatgaacatgtctttaccttttctttggagtttgcttaccttattaatatttgctgaagtaaatggcgaagctggagaacttgagctgcagagacaaaaaagaagcatcaatctccaacagtaagtaaacacatgggtcattcctgctcagggactaggctaattcctcaccagttttcccaaatagccagataaacaaaggtgcaatttttcttgaggaaaattatgttgagaagcaaacagggaaaaacatttagactgaggtatgaaattactttcctatgcacaaattattatctgtcattttgcaaataatctgtttgcaattgccaggaggtatctctgagaaatgtgcagagaaaaaagtggcagatgagcaggggcagttgggttgagatgatcaaaaagtgaagatgtatttggcctgtagttattcagtaagaaactttgttattttggtttaaaaattgtacttgctaattactgatgcattctctcgtttgaattatataggcctcgaatggctacagagagaggaaatttggtgtttcttacggggtctgctcaaaacattgagtttagaaccggatccctgggaaaaattaaattaaatgatgaagatctcagtgagtgtttacatcaggtaatacactggaaatatattgaagtcattttgtatatccatatacggtgacttaattgaacaagtctagattaatctgtaccttgaatcttttttaattattattttttattaatacataatttgatacattcctataatgtgtaaagttcaaatcagggtaattgggatatccatcaccttaaatatttaccttttcttcatgctaagaacatatgaattgttctcttctagttattttgaaatgtacaatagattaatgttaactatagtcaccctactggtctatcaaacactaggtcttatttcttctatctaactatatattgtattcattaatcaacctgtcttcagcctccctcccccttcctagtgtaccttgaatctttagcatagagaacataattgggcatcagacatgttcttgtaaaggacgatggcctggggttaatagtgggtagagggagtatgctaaaagatagaagctcattgtgccagacaatgcaccctagtccagagaaggcacggagggtggaactgaaactcctccacaggggatgcgaggaagtaggggaccaaggatatgtggacatgtgaccagtttgcttttgccacagaacagaattggccagttattctcctgccttactgggtgttttcatttcccaataatcactgcatatttcagtcataatgttagaagtcagcattattcagagcttactgtgggccatccactgtgcttagcaccgtatggatgttatctcatttgaccttcacagctgtcctatgaggtggcctttattgtcaccctagttttacaagaggtaaagaaaccctgaagcagttaggtaacttgcccaggacagcaataaatagctgagccaggacttaaaacctaaacagtctgcttccaagccaggtttcttaataagcaccctaaactggtattataggaaaacatacaaatggaaaataccttgatctattgttactgaaaaggataagtggaattatgctgtggctattttagcccagtgtttattacgcatggtgttgttttggtttttataataataggcaagatcttagtgcttaaagtagaatactactcaagtttttaattatgttactgtaaagataaatatgatattttcactagtgctcttcatttcttcttctttttctaaaattagatccagaaaaacaaagaagatattatagagttaaaagggagtgcaattggtctgcctcaaaatatatctagtcaaatctatcagcttaattccaaggtaagtctgacatctacgtcataagaaccgatgagttctccctagttctattgtataagtaaccgttttgtaggggatataccaactttgtgtgctctttagagatttagcatgtaactactcactgtttggttaaatgacacagctgtaatggaggctgtagaagtgatggacagaaggcaggaaatgctgtgcaagcacttgttgcagaagtaggccttgggctgggagcagtggctcactgcaagtgaatggatgattaatataaaaaactgcctgtaatcccagcagtttgggaggccacagagggagggtcgcttgagcctaggagtttgagaccagcctgggccacatagtgagactccgtctctaccaaaaaaaaaaaaaaaaaaaaaaatagctgggcatggtggcatgagcctgtactcacagctacttgggaggctgaagtgggaggatggcttgagccagggaggttgagactgcagtgagctatgatcatgccactgtgctccagcccaggcaacagagtgggaccttgccagaaaaaaaaaaaaaaaaaaagaaagagagagagagagacagaaagagagagagagacagagagagagagagaaagaaagacagagtgaaagaaagagagagagagaaagaaagaaaggaagaaagaaagaaaagaagccttgctgaagttctgagagcaatcttcttattggggaagtggatgcatcactgacatttatgaacatttccatagtcactgcctacagagaagcaatcggtcaacttatcagtgggttgtactttaaaaaaaaacttaaaaaaaccccagaaatctatgtgataggagggaataggaaggaagaaaatcctgaggggagaggaatgaagaggaaaaagggaataaaaggaggaatgaacaaagtgtgtccctagcagagggcattaggacaatatgtcaaggatataacatcacatgtgcaatgcctttgaaccagctaactgaagctttttcttccctattgccagctggtggatcttgagagaaaattccaaggcttgcagcaggtaggtctcatgctactacatacccaaatctttcacagaaaacatactagaatcattaatagagctgctattcttattttgaaggtgaatggatgattaatattaaaaacttgctttttcccataatttaattctcatcccagcatgtgcttcccaggatgcagatgcagagctgagtctaagacagatgaaatgacaaggctgaggtctccgagcctgttagggcttctgaccctgagtttgcagcccacagcccacatcctttaccatcaccctttagctgtgtgtgctgtgcttggtcagctagtgatctcccaacttgctgattctcccatcagggactggggctcggaaagcaagcatcctctctgacgctaagctcggaagtctaggtgtatcacaaaatagtccgaattttcttaaaatgacatttgctggtaattaaacttgaacagtttcttacagaaaacattgtataactgtactacatgcttgtagactgatctatgtaaacttaggcttcttaccccttttgtaggaagctgaccttttaaagactttcatggaagctgtaaccttctatgcagagaaatgtacagaatctcttcatgtttaaaattttgcataaaaatctggggattccagtgtaagaatttctgcaaaaatattcttcatctgttttgctcatgcttcaagcattttcctctacttttaagtttgatctgtcccactgtgaaggacagatacaaaaaaaaggactcatgcagattgaggcaggtcccaccattctggcaaggattgctgctgcaaacctttttgtcatttgatgatcaagttcgtgtattccttttctccacttagataatacattgacccctcagctgtcatttttaagagagtagttaagcgaaagaaaatgagtaaagaatagtgctgtggaccgtgacactgcactcaagttttgtctcctggagggcttcattatattcgctcagccagtcctcctaccctcatccctcaggaggaatgttgaatgattttcaaatgtgaatgctttgtgcctttggatagggcaaatgctctctggccaccacagtccccaccactccctattgtcttcctcctgactcctgatttcattttctactaggcccctgtaggcttttaagattttagtccccagacagtgttgcttttgtctgacagaaaacctttgaatgagtttgtggttaatgttttaaagagcattctatgatggacagagccaattgttgtgctagcacaaagagaaaaatagaataatggaataaaacagggttcataaagagacccccagacgtgtggtcatctaatttatgaccaaagtggagaaggaatgtgctttgcagaaaatggtattgagtcagttggctatcctctggctttctatttcatccataaaatgaaggaaacagacgtaatttttttttatgagtcactgtatatagtatgttgtatttgtatgtgtgtgtgtatgtatgtgcatatatatagacacatatataatatatatgtatgtgtgtgcatacatatatatgaaatgtaatcaacagtttgcccctattttaactttttaaaagcagagaattaggttgggtacggtggctcacgcctgtaatcccagcactttaggaggccgaggcaggtggatcatgtgaggtcgggagtttgagatcagcctggtcaacatggtggaaccctgtctctactaaaaataggaaaattagccaggcgtagtgggacattcctgtagtcccagctactgaggaggctgaggcatgagaatcgcttcaacccaagaggtggaggttgcagtgagctgagatcataccactgcactccagcctgggtgacagaccgaggctccatctcaaaaacaaacaaacaaacaaaacaacgataccaaccaaaacccagacaattggactatgagtgaaattcataaagtggccatcattgcataatcaagtgttccctctaaagaagttttctctggctgggcgcggtggctcacacctgtaatcccagcactttaggaggctgaggcgggcggatcacgaggtcaggagatcgagaccatcctggctaacacggtgaaaccccgtctctactaaaaatacaaaaaattagctgggcgtggtggcgggcgcctgtagtcccagctacttaggaggctgaggcaggagaatggcatggacccaggaggcagcgcctgcagtgagcggagatcgcgccactgcactccagcctgggcgacagagcaagactccgtctcaaaaaaaagaaaaaaaaatcaaaaagaaaagaaaaaagaaaaaagaaaaaaaagaagttttctctgcacccaaaggcagtaaaaatcttaacaagattcaaactggtagctgacatagggtcagattccccaggttatgtagatgtagatgtagacaaaggtaggtctgtttgtgatctgggctgaaagcagtcaggtgagcaccagggtgaaagatatgtcttagctggccacatttctaacaaagggacttggagcaggagttcagtcaccttaacccatgggaggaggggcagcagcagcagatgattatatttcaaaggctcacctcgagggaccaaagataagaatcaccggtaaaataaccggaatctccattttattttctttgtgcaatagcaacatccattattatttccacacctgaaacctttactcctgtccactgaggtctctttctcaggtgagaataatacttttccaagacaaagtgagaatcttctcccctcagacttcatcccacccgtggtcaaaagcatgctgagagttaaggaataggaacaagattgataatagaaaatgctttctgttttttcacaagagaggtgatttgaagaagaacataagtaatggctttaaagtgtagaaggagacccccactgattaagagttaaatgtaatcccacgtgcacggtaacatgcgttttgttgctgctgactgcaagtcatctcattgactgtcctgtttttgtttcagactgttgacaaaaaggtttgcagcagcaatccttgccagaatggtggaacctgcctcaatctgcatgattcctttttttgtatctgtcccccacagtggaaggtgagtcatctactctttggttaagaatgatggcaggtcagcatctgtggtttccttggaatcatcaggcatatttaattctccatctaaagtttctaggattctgtggcctcccaaatcaaattgaaatataccaggtatgctaaaacccaaacagtggtgagtatgattgtataacccaccaaatactaaagccattgaaaggagaggttcacttgattggataactgcctggaagaacacaatatttctgttaacattaatttaaattgttcagcattggaaagtaccaaacaaatcttgacatacctatgcaaattttctcattttctttgtttgtttattttttctgataacgatggaaactgtctccagcatgcacataaaaaaaaaagttaagtaagtattcccagatgtagcaccactgtgaactgaggattctattatgtttagataaggattcctctcctgtgactgctgtgatcttatgaagagctcttgtgttctattaggtgaaatctgagttccagaggaagaatagccaggggttaatatcagtattattgtatttgactttatgaggacttatatactgtccacgtataaatccttaaacgtatcatgtgaatgttcgctccagatacctctgtgacctttggcacctgactttgttccttatatgatcacagggtcctctctgctcagctgatgttaacgaatgtgagatttactcaggaacacccttgagctgccagaatggaggcacatgtgttaatacaatgggaagttacaggtaacttttttttttttttttggtaaatatcagtatatttttgaaggcctaaaacatcccatagttaagagcatcctaaattaactatctgtattccaccaaaagttggtactccatgaggaaatatttagctcttgcttaacgtctacatagctatttttacttaactgaagaaaagctcatgagtcctttactctcaccccgtgaagaaatccttgctctaacatccccaaggaaccggaagaaggctcccgtgattggcacagagagtaagcatggcctggtgcaaaaggagctgaagacttaggaagagccggagcattgaaggggagccactgaatggccttaagtagaaaaggggacaccccaccacaccagtgtccccagctgtactctttccatgtattagcaagctcatagttttgggtaaagagagctttattcaatgctatgtcaaaatgtgaccataacgaggtcaaagattaaactgaggttcaatgaatgaagtaactctctctgaccacagtcatcattatcagtacagctctatcttctcttctgacttattctgtcaagtgacttgtccacagaattctcctgctcagctcaggcatcactttctgcaggaaactttcccttccctttttaagcagagtgaggcatctcagggcctctatgttcccatcatgctctagggatatccatcgtcaaagctttgctgatgccacacacattgtctttctaaaaacgaagtccaaaaaattaaggcagatcaatgccaaacttacttttgtacagttctttgaagtcaccttttaaactagacagtgtctttccttatagtttggctggtctcttttattttgtgatttttaaaagattaataaataaattctgctatagaatgaacaaatcctttcaatgctctggagtagaatctcactggattgaagagcaattatttgctctcttactggtgtctctgctatcttgttcttcaatttccacataacaatatccattctagtctttccagcaaaaatgagtgcagtaattttgttttttaaaccatcactattttttttaaattttattattattatactttaagttttagggtacatgtgcacaatgttcaggtttgttacttatgtatacatgtgccatgttggtgtgctgcatccattaactcgtcatttagcattaggtatatctcctaatgctatccctccaccctccccccaccccacaacagtccccggtgtgtgatgttccccttcctgtgtccatgtgttctcattgttcagttcccacctatgagtgagaacatgcggtgtttggttttttgtccttgtgatagtttgctgagaatgatggtttccagcttcatccatgtccctacaaaggacatgaactcatcatttttttatggctgcatagtattccatgttaaaccatcactattaatgcacacttctaaaaatgcagtcacaaaccttctctttttatttgatacttttgtttttttgatctgatctttaaaacttttactcattccaggttataaactcaaattattcaaacttctactagatatgtctatgagttcaatcattatgcaaaagtaaaattaaccacttctgacttaaatttagtgttatgttattaaagagctttttgattccaggactctgtttctcatttaaatgaagccttttttccctgcctttgttaggcttgggctggaagcaaaatgcagtctagtctctcatttccgtgaacccattatctcctgatttctgtttatgggcatttatcaaggaggattgctacatagaggcattggtggcaaatgtccaggctcctagaacttctgctttctgaccttcctgatatctaggaatgttacagagattagatttcactcctagtcttcctttatcatcactgtcttttggagtcttgtgggccaatagagcgacaagtatgggcaaactgtgatgagatccatagaccaagataaaggctgttgctgttttcagcacgttatttcttccccctgcaaaatgaaaaacaaaacaaaaacccttttactatttaccactctgcagcatgtcagaggttagagttctttatccacacacacatatgacagaatgagagctaggaggaaaggaaccatttatttgttgaaagctgcatttctaaatgacagattcaactttgtaagaacagtacgaaattctctcttgcactcttttataaaggagagcaagaatacagaagaactgatgatgtgtggatggctttggaaatgatcttgattcctagactctgcccttcatagatttgctggaggacattagagaacagagcatttaaatcagggttctttctcttgatatgggaatagtttctgaaacctcatgaattccatttcattatctacactttaagtcccgtaattcaggcatatgttagagactttttgagggaataaaagaaaatgaaaaaaggtgcatgagcataagattaaattattgctttgtggaatccacgtgtaatgaaacaagtgaacatttagatactttcttgagttctgttaattatgtgaggttaaatccttgttaatcagggtattcactgaggctagaaaaccctttgggaaatttcagcacacattagctaaaagaaaacttgagcctcagaatcatctggacctgcaaaaatgtagtcatggcatcaaagttcgctttggagtttggacctcattcagtttctttaactctttgagctcttttacttggacggaaaaaggagtctttaactggattaataatttgccattgtaaagacctctgaaaaggtgcagatactcattcatggaaagtcctgtttcatacctgtttcataggtaaacttctggtggaaattcttttttagaacaatgattatagcacaagaaacatcattttctgtttccactgattcttttggcttgaggtctagacccagagcttcagacaactaacacaattacatttcgccacttctccatgctgttactccctctttgttctgaagacgtgattcttgttgtttccctgctcactttgttttgttttgtttgtttttgtttgtttgtttttgagacagagtcttgctcttgtcacccaggctggagtgcaattgctgcaacctctgcatcctgggtacaagcaattctcctacctcagcctcccgagtagctgggattacaggcacctgacaccatacccggctaatttttgtatttttagtagagatggggtttcaccatgttggccaggctggtctcaaactcctgacctcaggtgatctgcccgcttcagccacccaaagtgctgggattacaggcgtgagccaccgtgcccagcctcccctgcttactttggatttaagacagcccttgggatctgagcttgccatgcatggatggtgtgtgttgtacatttagggctcagatctagaaggctttccagaaaaacaaaaagttgagtttctctggttttccagaaacatgatgattagtaaattttatttcacttatttccattcatatcactggtagattttacatcatgcagagtttaaacaatgaggataatctagttttagctcaggtggtagttaggtattaaacttattacctttttcactcagtcagtaaaattagtattgaaccatggactctaacacaagttaaactatgactatccaagtgtgtttaacctcttctcaattgccaaaatgcacttgcagtgttttcaaagaaaagcctagatttgttctgctggaaccaagttggcaataaaaggtcatagaaaagacacttctgctatatcagtaactaataactaaagcaggaatagtagtaagttggttttaaaaatacaatatatggcttttattttcacttagggaggtatataagtaattgttcatttttaaaggccatatcaagacaccttgaaaatatattttgcctgttaaccctgttatgtttaaaaggtacatgaggctgggcacggtggctcacacctgtaatcccagcattttgggaggccgaggtgggtggatcacctgatgtcaggagttcgagaccagccttgctaacatggtgaaaccctgtctctaccaaaaaatgcaatacttagcttacgtgctggcacgcatctgtagtcccagctacttgagaggcagaggtgggaagatcgcttgaacctgggaggcagatgttgcagtgagccgagatcgcaccactgcactccgcctgggcacaagaccctgtctcaaaacaaaacgaaacaaaacaaaacaaaaaggtgcataaaaatgcagcatcttcatataactctacttatcagaatgtaagaatataacatgcaggaacaatggtgcaggagtcgggtagacctaagtgtctatttatcttctgccaattattcattttgtggttttgggaaatgttagtctgtaaaatgggattaataatacttgtctttgaggatcataggaaggaatcctatggtttacttgagtttcttcctccctttctctatcttctcacatcatctaaacttaagtgaaagaagtatactctgtagctatttagagaacagtataggattaatgcctactcatctcccagtgataatagcaaggatgaaggaagagagagataaagagaaaggatttaactgcaggtccatgaaccagaatctcctctcaaatcttatgtcattttgcaatagttaagcacttagtgataaaataaagacaatcttcttagcacttgctacaggggaatgcctgtagactgcaatatgaccataattcacagagattaccactattatttcataagaaattgaggcagagggagttagtacattgtctgggtaaacagttaacaggaaggaccaaaatttaaacctaggcaatcttatcccaggggtttccaaacactcagatctcccagacatagaaaatagaaagctagtaacagttggtttaaagattcttcagcagggtgcggtggctcacgcctgtaatcccaggactttgggaggccgaggtgggcagatcacctgaggtcaagagttcgagaccagcctctacctctagaaaagagacttctgctaaatcagtaactaatcaattggtttcaccacatggtgaaaacccatctctactaaaaaaagaaataaaaaattagccgggtgtggtggcacgcacctgtagtcccagctactcgggaggctgaagcaggagaattgcttgaacctgggaggcggaggttgcagtgagctgagatcatgccactgcagtccagcctgggtgacagagtgagactccatctcaaaaaaaacaaaaacaaaaataaaaaagattcttaaacattgttgggaggtgttgggacaggtggcaaagtaaacttttagtaatgaagtctcctggatcaaatgctcaaatatgtgtatgaactgttttaaagttccataatcctcaagagtctaattaaattctctatacaaatattctatgtaaagatgggaggacaaagaggaaagaaaacaatatgagaaggaaagtagagagagatgcggggaatataaatgtctatgggggggatggataattcaatttctctttaattttaatcatttattgttattttcctatgactttatcttagtgagccgttccaaaggcaactttggaatgctcagaaatgtcatatattaatgaatcagcttttatgtaaatatatactgatgtcgtaaattgcatggaacatatttataccaaaaaatattcatttattggaaactcacatttatttgggcatgctgtatttttatttgctaagtctggcctcccgacttgaatgcatggatggtgctccctgcattcttattctccatttctggccacactcattgctctcctcttccttagaaactgccaaaaagctgccaccccagcaattggttctggggcccaccacaggcaagccgaatcctgtgcctggaggttggttcttgatgcctttcaaacagtcaaatgctaatttcccacaatgtcgttcatacattgtcatccatgaacattactaagctccttgtacctcactgtgtcttgttaaaatagctcttttcctttgtagaatggcatgggagggaggcctggccacgcaggcacgccctgttccttgtctctgacccctggcaccaacagtcatttcccccatgagagcttttcttgccaattctgctcaagtccggcaatcggcaacctctgggcctggccctacctctccatcagatgtgccctggcatgtggggataggcttaggcttctgggactcctctaccctcctcctcccctagctcccatgctcagatcatagaagttcccattaagctgcagagataaggctaaagcagctttaacaatgacaagggcttaaaacaacattgcttatttgattatcattggacttaaatcttctagtaacaaagcacccactgctagcttacgcatagtgtaataattaccacattttgttggaaattcaagtgtggctatgaaagaaatgccactgtattatattatataactacgctttttatggatagaagacatattgccctttgtaagataataataatgatcatagactgtgaggtgtggacactggattgcgtgtggggttatataatcctagagagcattcagagttatcagtgtagcccacgttgcctgtgcttcatggcaggtccaattggacagatgatgaatggatttgctgatctctccctttaccttcttgaactaactccattacctttggcttatacacatctgacctttgaaaatgctgtttgatgacctgataacacaagaatttatagtgctaggcttaccagataataagttgtgattcaccaacattgtatttactcaatccaccacttggagcacagcagagtgattttctcccgagactccagtcagtaaatttgcattgctggctgacgattccaagttaacatcgttgatttgtaatttgaattatttttctcattgatattaagagacaggcactggccccaaagcgcgtgccctgacattgtgctcttgtgtaaccaacagttgtcactgcccacctgagacgtacggaccccagtgtgcatccaaatatgacgactgtgaagggggttctgtggcacgctgtgtccatggcatctgtgaggatttaatgcgagagcaagctggagaggtgggtcccttccccaaatgtgcctccttgcagagagccatggttagtagctcctcctcctcctatgcccactgcatacaagcactacctggagcttacagaggtgaagtcacttcctgtctgtaagtaggacataggcgaggaggggagatgaactatgcaggaagtaggacccagagattaagatgtcattatgtaaaataggatttttttttttttttttttttgagatggagcctcactctgtcacccaggctggagtgcagtggcacgatctcagctcactgcaaccttcacctcccaggttcaagcaattctcgtgactcagcctcctgagtagctgggattacaggagcatgccaacatgcctggctaattttggtatttttagtagagacggggttttgccatgttggccaggatgatctcgaactcctgacctcaggtgatccacccgcctcagccccgcaaagcgctgcgattacaggcatgagccaccgtgcccggccgaaatgggaccatttttattatcccgtcatgactctctctgagataagaccttctcttggccttgtaagttttattttaacagtgacaaaacacaggaatataaaaggaccagtcttgttggcaacatgtggtttcaaggagtctgacttttcccggcctgggtctctggaactgctgcagactctaagagcccactccccagaacgaccctccatgccctgcgtcctgatgactttgactcctgaccctcaaggttgtccagtcttggctggcttggctcttcatgagaacttcaattctttatttttagttgtattttttctacccatgtgatggaaaataattcccgtccaatgatggggatggaagggttgaggaggtgggtaggaggaagaactttccaaagaaaaacaaacggaattgattttccaaggtctgtgcctacatgggtgtttttccctctaaaaacatagcaggctgagttgattgactttaattatattgacttacagttcttgattgttgttactctttccctggcatctttgggagaaattatagcttgcttttactctgaaataaagatgtttccctttttgcatggtctggtctaaatgcttaatcatatgggaagaaaaagagaagccagtggattggccttatggaaatgaacgttagaggataaacagttaggggcttgatgaaatgttcaaaggcttttcttgctgattttcatgattgtctttattcacgctgttgtcatcctgccagcccaagtacagctgcgtctgtgatgctgggtggatgttttcacccaacagccctgcctgcacgctggacagagacgagtgcagcttccagcccgggccttgctccacacttgtgcagtgtttcaacactcaaggctctttctactgtggggcctgtccaacaggtacattctcagggccacaagccaggctctgcatgccaggttggcgaggtgccagaaccaattttctttcactattgatgagtaagaagacaattcttaggaggtgttcaaatccagttttgtgtcctggttctgctcgacgatctcactgctatcacaattccacgtcaaaagggggaggcttgtccaaaactgtgctagagtcagactttggggcaaggttagccatagaatttgtaagttagacactgcattgcagtgaccaccaactgaccagatttgagatcaaaagagatactctagtcccacctttcatactaaccagatgtttgtacacatggggaaattatttgacctctttgcatctccaccacagtctagtagctcttgcctgggtgtgtcattagagtatcttgcggccttgacctaaacagaggtatccagctccattatgccctgcagcaactgaatctccagggatgccatatgttgagtcatggaaaacatgggctccgttagtcaaagactgcctgtgtttgaatccgagggcatcttttgttttatgagatagtcatcatatattccacacatttttttttttgtaggatgcctactatgagcaaagcactgtgctgggtgcattggtaggcaattagccagacctcaggttcatctgcgctccagggatgttcttagaaatggagccacaaagataatgtaataatagtagctggttttgttttgttttgttgttgttgttttgagacagagtctctccctgtcacccaggctggagtacagtggcatgatctcagctcactgcaacctccacctcctgggttcaagcgattctcctgcctcaccctcccgagtagctgggattacaggcacacctcaccacacccggctaatttttgtatttttagtagagatggggtttgccatgttggccaggctggtctcaaactcctggcctcaagtgatctgcctgccctggcctccaaaactgctgggattacaggcgtgagccaccacacacggcctggtttttatttttaatcaaagtgttattaaggcattgtataagcaatttttaattcttttaactacaacaaaatcaagacatggtaaaaataagtattactcacattttacaatatgagaacttgagcttaaagaggttgaataacttgcccaagatcgcatagctttacagatagccagaattgaaacccaagtttcttggcaagtttcttctcgccaagaaaccccacacacctattgccccatgtagtgatttttggtttagtggttttctgcgtgtatatatttagatcttgtaaaactggaaagaaatggaaaaaaaaaacctataaagactttttccctcttagttctcaggggcaagcacaatttgcaagcaatcacattttgaaggtaatttatcatggacaatctttaaaaactataaatcagaaaaataaattatttaaattagaagattggcaatgtttttacattcttctttttattgttggagaggaaaaagagaaacaatttttttgttttcttgtttatcaccctatttttcctgaaatatatggtagttatattttataagcagcaaagcaatatatgctgcttataaaatatcactacaaaaatatggaaaaaatagaaaaaaatacctttgatcttatcacacagaggaccatgatgaacatttgggcgtttttttcttccaactttttttcatgtacacattttgccatgcacaaatatgataattttcttaggcagagtcttagaagaggattctacttaaatcaaagaatatgaatatttttaaatctttaaaggtttttaagaattcttataattttaataatttgaattataaatctacaaccattgaatacaatgggaaccactaaagtaaaattcttaaatctcatcttcctaatgacaccattagtcatttgttctccttcctcttctactttattcttcatttgtacaagcacatatgcaagagtttaaaaaattctttccccaaattaggagtatgagcccaatcctccatatgattttaacagtttgtttttgtttttgagacaaagtctcgcccaggctggagtgcagtggtgcaatcttggctcactgcaacctccacctcccgggtttgagggattcttctgcctcagcctcccaagtagctgggactacaggcgtgaaccaccacatccagctgatttttgtatttttagtacagatggtgtttcaccattttggccaggctggtcttgaactcctggcctcaggtgatctgcccacctcggcctcccaaagtgctgggattacaggcatgagccaccttgcccagccacatttagtattttaattaatgtatatacaaaaattctttcaatgtgtgtgtatgcaaatgtaggtatacaggtgtacacatgatattaaaaagcgtttttagtatttggtcacaaagatgagtcataaggtgttcagctatgcttctattgataattgagggttttttccctattaaacagtgctgcggtagacatcctcttacctacttataccagtatactaagatgtatactaccatcttagtatactggtagttttatcacaataggctgagttttaataggtgcaactggcagtcaaagtctatgtattttaaaaattttagtgaatactgccagagctctttccaaataggttatatcaatttaatgtctagctatcagcatataagaggagcccatttgcccactttgttgtcagaatttgattttaagaattcaaaacaacttttgccaatctgataagcatatctcatttttattttatagttccttaggtggagaaggtttttatatgttttgactcttgtatttcttccttgttgacttgtctatagagctaaacttttaaatcctcttgttttcctaggctggcaaggcaatggatatatttgcgaagatatcaatgaatgtgagataaataacggcggctgttctgtggctccacccgttgagtgtgtgaatacacctgggtcttcccactgccaggcctgtccaccaggtgctgcctcggttcaatgtcaacctcctgaccccagcacagggaacacagacataggaatacggaatctagtgctccatttaaaatatgatttctggctgagtgcagttgctcatgcctgtaatcccagcactttgggaggctgaggtgggcagatcacatgaggtcgggagttcgggcctggccaacatggtgaaaccctgtctctactaaaaagacaaaaattagctgggcatggtggtgcatgcttgtaatcctagctactcgggaggctgaggcacgagaatcgcttgaacctgggaagcggagattgcagtgagctgagatcgcaccattgcactccagcctaggcaacagagtgagactctgtcttaaaaaaataaaaaataaaatattatttctgtcttaggagaggaaatagtacagaaagttttgcttatcttgtgaattcaggacacattagtacaactctatgataagaaagaaaaaacattttgaatatcagtagaaaacaacaaactttacaaactgtcaaatagctacagagataatgcagaatttgaaaagttttctgagtggatcacagacttactgttccattgccctcacgaataatttgttaatatcatgcactcctgagttgttttgcatataccaagtttactaaaccacaggcatcacagtaggcatatatcgtaattgttggtttccctccttttctggaaagaagtcttttctgctattctctaatctaaatcgaattactacccaagaagttcagggagtactaagggataaactgaaaccttgtatgtttaaataacatggaactacagtactttgggcttctataataattgacctctaagaacatcagagtcactgtaatataaaaatattaactttcttagtgtcagcactttctaagtctaccagtagttttatacatatttttttcattagaaacaacccagaacattgcttatgaaatcaggttactaattcttgttatttttcttatttatgaaatttcatttgttgatgacattttatacttatattttttgtttcgatgatagaggatccctgattggtccatttcatgatatttgaatcctagacaggctttgtcctcccatcttcttgacattgtttcttatgacctggctcttgttctcatcagggtaccagggtgacggaagagtgtgcacactcacagacatctgctcagtcagtaatggaggctgccacccagatgcctcatgctcctcaactctaggtaatgactcatctctctctttggctttgggtattgtaatatgaccttctaaaccaattcaacatcttaaacacaaaatcctctgttctcaaaattgttattttgaccttcaaacctaaaattaatccatgccataaaactacacatttggctttcttaaatatgtaataaactatgctctttaatggtctgctctgatttaggaaataaggtaattaagccagttaattaattaacgactgtattccaacaagcaggcaggagaaaaggaggaagaaggcaatgccaccttcttttgaaggactcttccatttctaggccattgcttagaactgagctttgctgcaaagggagtttgggaagtacactctatatttcaggcatcctgagtccagctgaaataaggagttcagaaagaaggaagtagaaaatagatctagggtgacaaccaacagtgtttgcaatgctgcatagaagggtttaaccctgtaatttaacaaaatatatactgctaaactttctccaagaaagattgtatcaatttatgtattcaccgacagtgtataaaaatacatatttactccatctttgacaataatagatattattattatttttcatcttggtcagttttataggcaaaattagtttttccattattttcatttatactttttgattactaataattaatactttccacattttcactgggcatctttctacttgttcatcccctttgctctctttctttcttactgattggtaaagtttctttatgtactaaggacattatctcattatctgtcttatgttttataagtgtttttcctggcatgttgtttttgttttaatcttgtagtggtagtgctattcagaagtttagaatttttacgtagtcaaaaagataaatcttttctcttactatttctcccttcacagtcatgtttaggaaggctttctttactgaactctttaaaaattgtcaagtacatgttcttttatacttctatggtttctttttttatggtaagatattttatatttttagaatgtattttttatccgtagcatcaaatagagatctggcttggtatttttgctcaaataagtggacccagttccatttcttgaataatcatgtctcttgctatttcaagataccacctttattttttattaatttgtcatatacttgcatatatagaaaagaacatatatgtgtatgtaaacacacacacacacacacacacacacatatacttgtgactaaatgcttattaaatgattatcaacataccaaagtggttaggagcatgatttctagataaagactgcttgcatttttccctgggctccaccagattttagctgcttgtcctcagtgaagacacttaatctctgtgctttagttcttcatctgtaaaatgaggataataatagcacctacctcagggtgcttcagatgattaaatgagtccttatatgtaaagtgcttgtaacaaatattattacaaaaataactgttttttaatatggaggacagtcataatgttgatgacatgaagtattaataacactttgtgtacttttaggctgcccttctttactgcaacctgtaagtttaccctgggaaacttaaaaaatttctactcagagcttcaacagtttcagagcttgcttactccatttttccctataaatatttttaaaagaagtaattaactataaaaaaatgcatttctaggcaattatttatttaaaagaaatatttgtgttttttaatattgaagtggaatcttgcaagtaatataagctgagaacataacaaaacttgtatttttgccaggcgcggtggctcacgcctgtcatcccagcactttgggaggtcgaggcaggtggatcacgaggtcaggagatagagaccatcctggccaacatggtgaaaccccgtctctactgaaaatacaaaaaattagccaggcgtggtggcgggcacctgtagtcccagctactcgggaggctgaggcaggagaatggcgtgaacccgggaggcggagcttacagtgagctgagatcgcaccactgcactccagcctgggcgacagagcgagactccgtctcaaaaaaaaaaaaaaaaaaaaagaacaacttatattgtcattcaattctactgtaaatctgtcacattgtgtaatttgttctattttttaaattattcagcagggtttttctatccatctttaacagttcttgctgatggaggaatgtagttaactgccacattgatttccttgtattatttcaaccattgtgcagtagtagaaagaacatatatttctgcaatgagatgtggctttttgctattaagtgagaaatctggaaaactctctggatattaaatttagtaaaattttgtaatgtctatgacgagtatttttaacctaacattgcgtaagaaaactgtcaagatgctggatgctctaaaactattgttagctattacctcatgtacatcataattaatcgtggatgttaattcatgttttaaatagacacgatcatttcaaattccttttgaccaagttccttcctaacctaattcgattgccattgttttaaccttgtaccttggcaatgaggagctcatcagaagtgtgggagaagttttggtgctggtattttgttgatgtccccatatatttatgttactatattatcttcaatctgtggttttattgcaaacgtcttttagagacttaagttcattctgtgatagctatttagcctgtttaaaactggcagcatgcaatctgcacatccacataactggggacatgtggcctgcctgtgtaagccacactcctgtacaggtgtgctgtaggcagcctacacacgaggggagtgcttgctctctgggctcccctcattctagctgtgtgtgtgtgtccttggccgggacaggctgtctgtgtactggcttcatctgtaaagtggggattataagagagtacctatatagggctttttttttttttttttgagatggcgttttgctctgtctcccaggctggagtgcagtggcaggatcttggctcactgcaacctccacctcctgggttgaagtgattctcctgcctcggcctcctgattagcctggactacaggccaccatgccccgctaattgttttgtatttttagtagagacagggcttaaccatcttggccaggctggtctcaaactcctgacctcaggtgatccgcctgcctcggcctcccaaagttcagggattacagattccatagggctctttattagtattattattattataattaaaaaattttttcttggaaatggagtctcactctgtcacccaggctggagtgcagtggcactatctcagctcactacaacctctgcctcctgggttcaagtgattctcctgcctcaccctcccaagtagctgggattacaggcgtgtgccaccatgcctggctaatttttgtatttttagtagagacagggtttctccacattggccaggctggtctcgaactcctgaactcaagtgatctgccctcctcagcctcccaaactgctgggattacaggcgtgagccactgtgcctggccctctattgggctcttgggaggattaaatcagtcagagtaagtccagtgcttgcaacagatagtttcatcctaagaatctccttttctgcattaactcctccatgatgaggaatgtctgtcttccccaggtgcagctcacctttgtgcacagctcaggaccatctgacatatgggctgacagcacccatgtcaacccagtacgtcaataatgtgtggaaggcatttaatggctttcttattttaagataagaaatacaaaaataaagattctaatattttctcctcataccttgttttgtctgcccgtcaaaatacacagactggatgttggtggatccttgtctagacagcagattctgagtttagatactgcatccgaacagaggaggagacctgtatttacacgtttgtttttatttctgaacaggttccttacctctctgcacgtgtctcccgggttatactggaaatggttatgggccaaatggatgtgtgcagctcagtaatatttgcctaagtcacccctgtctaaatggacaatgcatcgtgagtcctttgtttttcctgtggacagagagtacctgagaattagtttcacgcctataaaatgtaacgttataggattcaggaatgtcaagataatgagtcaagtttcagataaggaactgtcgagaactctcagatgaaagatagataatgattttagttcttaggaaaaaacattgagttaattttttgtctcagtggtttatgaagtactaaaactacgcctgcagtttgatctaaataaatctgacatacaaaacaattaccatttaaacctattaataacaagtagactactagaaaatacttacatataaacacatatatatttgtagcacctgttaaatatatcagtaggccaggcgtggtggctcatgcctgtaatcccaacactttgggagggtgaggcgggtgcatcacgagccaggagatcaagaccagcctgaccgacatggtgaaacactgtctctactgcaaaaagttagccaggtgtggtggcgcgtgcctgtaatcccagctactcaggaggctgagaccggagaatcacttgaacccgggaggcagaggttgcagtgagctgagattgcaccactgcactccagcctggccgacagagcgagactccatctcaaaaaaaaaaaaaattatatatatataattatacatatataattattacataaataataattatttttaaatatataattatatattattttatatataataattatataattattatatattatatatctccatggcactacattcctattatttgggttgattaaagtttagtgtctatccatttgttttatggtattatgtgttttttttccccttaggacactgtctctggttatttttgtaagtgtgactcaggttggacaggtgtcaactgtacagaaaacatcaatgagtgtttgagcaacccctgtttgaatggaggaacttgtgttgatggcgttgattctttcagttgtgaatgcacacgtctctggactggagctctctgtcaggttcctcagcaaggtacagtcagcatttcttatgccacggatgctcacagcatagcagcagcatcctttagtgagtccctcaacagattcctctgctgaacccactttcttgtccagttgctcagatactgagaactaagtctttccttgcagaaatggtataaaattcacaagctaaatatttataaatctcactgtaagccaagaacttttcttccaaagaataaatacattagtatttgccattttcactatgtcctttttgaatataaaacatgctaaggtattgtcttttatggttttctaaagggaagttttctgaggagcagccacttaatttccctagagtactgcattgaatcaagtcactctccctttccaggatacacagtggcttcccgttgcctgttaaatagagactgggattaattttcaatgatcttctataaccaagtctcactcaatccatctaaccttttttttcactagttccctagaaataacttcactcaagcaagttttctttcgtcaccggaccccatgtaccaccatgagtattttccactgtgttcatttatttggaatgtttctcccgataaacctcctcacacatcttccttgtttctcatccagatgtgtctgtccctcaggagcacttccctctcaacttcttccataaagtcacttttgactcttctgcccctcacttaaactcctgatttggaatcaacacatttattgagaggttgttgttatatgtttaggacaatagtagaccctatggaaaaatatgaaagtgtaaaatactgtctccacttatgaactgctcaccttgcagctgaggagacaagaccaaccccaatgggagaacagatacaagagttaaagacatgagctatgttgtgtggggtgaaattgggtgtcacagggacacagagaatgggaatcagtgaaaacataagacatggcagttcatggagcaggtgatgaggcatcagctgagctttgaacaagaggtgggatttctatggaagttgacagaaaaagggcacagaggagagggaatggcagggcttttatctccaaccttcattactcaaattttctctaagtttatcagcagcagggttacagttgcccaacctcttccttttaggaacctctgaaaagcacagttcatcttttcctttgcagtttgtggagagtccctctcaggaataaatggaagcttcagctacaggagcccggatgttggttatgttcatgatgttaactgcttctgggttatcaaaactgaaatgggaaaggtaaatgtagtaactcttgcccaaatgcatattatatttgtatatataaatatggagtatgtgtatattttattacataaaatacatgcaatgataattcaactatcatatattgagtgcttactaagtacggagtgccattattttggctagacatatacctaccttttcataaccttacattaattgtttgaaataagtcacaggggctgggtgcagtagctcttgcctgtaatcccagcactttgagaggatgaggtgggtgcatcacctgaggtcaggagttccagaccagtctggtcaatatggcgaaaccctgtctctactaaaaataaaacaaataaaaaaaaattagccaggtgtagtggcacattcctgtaatcccagctactcgggaggctgaggcaggagaattgcttgaatccaggaggcggagtttgtagtgagcagagacagtgccactgtactccagcctggccaacagagtaagactccatctcacaaaaaaaaaaaaaaaaaaaaaaaaaaagagtaacaaggccaggcctggtggctcacgcctgtgatcctagtactttatgaggctgaggcgggcacattgcctgaggtcaggaattcaagaccagcctggccaacatggtgaaaatccagctctactaaaatgacaaaaattagccaggtatggtgatgggtgcctttaatctcaggtactcgggaggctgaggcaggagaatcacttgagctcaggaggcagaggttccagtgagctgagattgcaccactgcactccagcctgggtgacagagcaagactctgtctcaaaaataaataaataaataaataaataaataaataaataaataaataaataggaggatcctccttttatagatgaaataatgaaaagtaggtgaagctaaacattttttgttaacacttcttagcttgtaattgtaatagttgaatttcaaagtcaagtttgtctggttccaaagtccatgctttctccagcatgaatgattctctacactggttgactgactgcaagccactagttaatctgtaaaatcatgttgttactgagacagtattttagaagatggttgcttagttttatgttgattattgtgcaaaaatggccactgatattaagatagttttcttatcaaatgtctttgctctgccatgttctatactaagtgctccatatacattacagcattccatttttaactctcataaccctgaaagatagaaattattatcttcattttacacatgaggaaacagagcctagtgccattgagaagtgtgtccaggtgcatgtggttcgaaagtggcatgcagtgactcagacacaggccagtcacctccacagcctgtcactctgagccgctccgtgaacgctcttcaaattaagatccaagtccaaggtttttagtgctcttatacccgacattaattacccaggcatttctaaatattgtttctcaaccacctcctggattcataaaaataaaatggtatgtctgaatagataaaattttcccttgaaatcctattaactttttccagcaaactattacagagggcattgtacaagggtcaaaaaacatttttttttcctttgaggagggaggactatttgcgacctggtaacctcacactaaaataaactccaaaataaatttcccagtgggtatgctatgtgaatttccttccttccatttagttttcatgaattctatttcctggcattgaaaacattcttttgaaaaaaaaatattcttaggtgagaaacttgtaatactttcattaccaattcgcaagaaaattcatcttgtttttttcttgattattgtgatttcatatcttctcactcataatggacataatatggtagaaaatatatacaaatcaggatagttcaattagtgaacatttgagtttcatttaaactgttttaagaaagtcatgtagtaataggtaactgatcttaaaataccctagcacagaatttaaaaaattccttatattctttttcattaactgaatattgttgtgattttaggttctgatgaaaattaaattcgacagccttcttttgattgtttatctcaaatgaggttgtcagtacgttttataagttatattactatatttgaagtctgtattctaatccattcggacacatttttgtgtttattctcttctacttgtatgctcagtatttttcctgttattcttgtatgctcagtattcttcctctcattctctactcttggtattactcatcctttaattatatccagtccctgaagccgtccaggccttgcttgtctacatcccgcctactccgcccacacctgagcgtgtcggtctgggctggcgtcagaatcttagcccctctggaatcaacatccctggcgggcagtgatgaacgtctgtgtgtttgataacaggccacaggttattcagggaattagggtgtacattcttgtgaatggtaatattagccagttcaacttaattcaggtagattttcaaatctccaatttattttactgctttagaaacaatgtcagttatatatttgacataccttggtctggtggacttgacaagtttaatgaaattggggtaaatctatgttattaacattaagattttttgatatattttgatattagttgaagtttgtttttaacaatatttagcacaagttatttagtatatagattgccatatgtactggtggataattagggaatgataggtctagctcttgaaagtgcctcagtatgaatgctgcctaggaagtgggagaaatactttaaaatttacatggaagtaaaagataatatatgtggcctttgtatttttaggtcctgcgtatcactttcacttttttccggttagaatccatggacaactgtccacacgagtttcttcaggtttatgatggagattcctcttctgcttttcaacttggaagattttgtggctccagcctccctcatgaactcctcagcagtgacaatgctctctattttcatctctattctgaacatttaagaaatgggagaggctttacagtaagatgggaaacacagcaaccaggtatgtgtgaacctggagaaaaaagcaagcaaaattttgaggttattaagtgttcttaatcagtgttagacttttggatacatgagatgttttgggatctgaagatatataatatttttataatttattttattttattcatttatttattttgagacaaggtcttactctgttgcccaggctggagtgcagtggcctgatcacggctcactgaaacgtcgacctcctttgctcaagtgatcctcacacctcagccttctgagtagctgggactacaggtgtgcaccaccactccaggctaatgttttgtgtgttttttatagagatggagtttctctatgttgcccaggctggtctcaaactcctgggctcaagcaatccatctaatttggcctcccaaagtgctgggattacaggcatgagccactgtgaccaaccataattactttaaaatcaaatcaacctagaattaattagaatttattttgtgtctaaaggcaacaaaataagcatgaaatagaagggattaaaaaacatgagtcttagttggtcccttatcaaattactgaacagcctttttataagctctactagtagtttactgcaggaatattgaggacattgtccaccccttcatgtagtattccttcatcttaatgatcactcaataattttttctttttgttattattttgttttaattattctattttcttttaagtttttactatgcaagttttaaacaaataaaaagtaaagagatcagtataccatgcccccaattcattcatcaatacatctgtggatcaatttcagcattttctcatcttttttactggtgtttttatctatcctgatgctacctaggcttaacttctgatgcttgaaatctgagagtgtaatttcaactttgttcttttcaaagatgttggatattctgcatttccatataagtttttgaatcaacttgtcagttttcccaaagaattttatgggaattacattgaaactataattaactttggaagaaatgacatcttaaaaatattcagcctgccaatgcatgaacataaactatttttaaatttagttctcttttcatttatcctggcaatgttttatagctttcagtgtctaagtattccatatctttgttagatttatttacagatatttgatatattatgcttagtgaaatattaattttctaaaatttaatttttcacttgttatgtaaaaatatgtattttttaaatatttgattttgattccatatacattgttaaattcactcatcatgtctaattattttttgtagattcttttggattttttaaacgtacataattacatcatgtgtgaatgaaggatatttttcctcttcctttccagtctttgtaactattatttcttttccttgacttattgccctggctaggaccttcaataccaagccgaataaaagtggtgaaaaggaaatccttgtcttttccccagcagcatggggaaatgctcaatatttcattgttgaatatgatgttagctgtaagttttcacagataatttttatcagatgaagagtgttctttcctatgtcaactactattgctgtataactaatttcccacaaatttagtgttgtagaacattaatcatttgactttgtttctgattttgtgggccaggaatttggaaagaacctaacatgacagttgctacttgaaatctattcagcagttataagcgggtgtcagctgggactgtagctgtctaaaggctggactgggctgaatatccaagatggcctactccagtggctaccaattgatgctggctttcaatgagagttcaactaggctatggacctgagtgcctacatgtggctactctaaaaagtttgtcttagaatagtgaaactttcttcgtggcaattggcttctctcagagcaagcattacaacagaaccagacaggtgctgcgtgggaatttttcagcctatgtttggaagtcattgtgttatttctgccatactcaatgggttaacttagtcacaagctgacccaaattcaaggcgaggggacataggcccacttctaaatgggagaggtgtcagaatttataaagaattaaaaaaaaacccacaccttttgttcctagttaccaagaattttaaaaaatcatgaatgaatgttgaaacatataaaatactttttctgactctattcaggtgatcatatgttttttgtcctctattctgtaaatatagtgagttaaattgattgattttgaatggtgaatcaactttgcattcatcaaatattttccatttgttcatggcaagttatgctttttatacattgctagattttatttgctaatatgtatttttaggatttttatatctatatttgggtgatattcttttgtaattttgtcaagttacaggtaatgtcaatgttttaaaattaatagaaaagtgtcctctctttttatattctctggaaggatttgtgtaagattgacaatatttcttaaatgtttgaaataatttaccataaagttaattgagcctgcaggcttccttgtgagaaggctttaaattatgattcaatgtatttaatatagatctattcagagtttacatttcttcttttttcagttttggcaatttttttctcaagaaactcatctgtactttcagaatattttcttactatgttttagtgttcgtaggctctgtagtgatgtcgtctcttttcattcctgatattgataatttatgttatcttttttaccttgataagtcttaccaaggatttgttagttttactaatgttttcaaaattccaactattggctccgttaatgttttctgttgatttttatttcattgattttcctcatggttttatcattttcttcccttgtgttattttgcacctaatgtatggttactttaacaattttttcctagcttcttgacttggaagcattgacaaatgagtttgaacttcttagaatttctaatatatgcactaatactaatgcattttccttggagaacttttatttgcatcccacaggttttaatatgtatgttttcattagcattcggctgaaagtattttgtcatttttattttgaattctctgtgaccataggttttattaaaattatactgtttatttaccaatgtgatcactaatcatgcagtatattatttcaatctttaaaatttgttaagatttactttatagaccaaagtctattttggtgcatttattgtatggacaggaaagaatgtatattctgtaatggttagatgtagtcctctacctatattaacttagtcaagttggtaaatagtgtttttcaaatattaaatttctttactgatttaaaaaaatatttgctttattacttagtcagaaagttatagtaaaatctcaaactatgattctagatttgccagctttttgttctgaaacttttgctttatttattttcttacattatttttatcttcttttcccaatatttcaagcatttatgttttcccagctttattggagcttaactgacaaatgaaagttatatatatttaagatgtacaatgtaatgttttgatattttgatatatgtataacttgtgaaatgattaccacaatgtaactaatatatctatcatacatagttaccattttagtcaatatggtgaaaatatttaagatctactgtcagcagttttcaagtgtataatacaatattgttaatgatagtcaccatgctgtacattagatctctagaagctattcattccagagaacataaacgttttagcctttgaccaacatttccctattgcccccacctctcagctcctggccaccaccattctactttctgcttctatgagtttaactttttttagatttcacatataagcgagagcatgcagtgtttgtcctcctatgtctggcttatttcactcagcatgtctccctgtttcatccatgttgtcacaaatgacaggatttccttttctttttaaggataaataatatcccatttatgtctgtgtgtgtgtttttgtgtatttatatattgcactttttctttatccatttacctgttgatgagcacttagattgattccatatcttggctatggtgaatgtatgaatgtattgtgaataatgctgcaatgaacatgaaagtgcagatagctcttccagatatttatttaattttctgtggatatataaccagaagtgagattgctgaatcatgtggtagctctgtgtttaattttttgaggaacctccatattgttttaaatatggctgtaccagtatactttcaacaagggttcccttttctccacatctcatcaatacttgttgtcttttatcttctcgataatggccattctaacaagtatgaggtggcatcttattgtggttttgatttgcatttccatgatgattagtgatgttgagcattttctcatatatttgttgaccatttatatgttttctattcagaaatgtctatttggatcctttgcccatttttaagattgggttagtttgttttgttgatattgagttgagttttttatatatttcagttgtgcttttgtggtcatatccaaaaaaatcactactcagactaatgtcatagggcttttcctgtatgttttcctggattggttcttcagttttaggccttatgtttaagtctttaattttgagttgactttgtatgtggtgtgggataagggttcagtttcatttttctgcaaatggatatccagttttcttagcaccatttattatagactatcctttacatgttgtatgttcttgccatgtttgtcaaaaatcaattcagcataatatatggacttatttctgggctctctattctgttccataggtctagatatctgtttttaatgccaataccatactgttttgattactacagttttgtaatatattttaaaatcaagtagtgtatttttattttaaatgtatttttaaatcaggatgcctccaggtttcttctttttgctcaagattgctttagctatttggggtcttttgtggtttcatatgaattataggattctttttctattttgtgaaaaataccattggaattctgttagagatggcattgaactgtagactgctttgcatagtatggacattttaacagtattctttcaatttgtgaacaccaaatattttctttttttcattaatgtggtatagttttcaaaatacagatatttcactttcttggttaaatacattcctaagtatttaactttttgacactattgtaaatgggattttcttcttaatttcctttttgtacagttagttgttaatgtatagaaatgcaactaattttatatgttgattttatatcctgtaactttactgaattagtttgttcatttattagttctaaaagtattttagtggagtctttagggtattctatgtatgaaagatcatgccatttgcaaacagaccattttacattctaatgggatcatttttcttcagcctgaagaacatattttaatatttctcacagagcatgtctgttgaagacagattccctcagcttttgtttaagaatgcattttttaccttaatttttgaaggatattattacacatagaattttaggttgaccatttcctattagctctctaagaataccacatcagtgtcttgtcacttccataatttttttggggagaggaacctcagcagtaattcttgttgttctcctgaagataatgtgtctttttctccaccctcactgcttttattgtgtgtttatatttaattttccacaacttgattatggcgtatctagatctggttttctctgtgtttgtcctgcttgagagtcactgagagttttgaatctataggttgctttcttttatacaattttgagaaatttcagccaatattttttcaaatattgcattgccacttttttcctctttcttctccttctgagactcaaattacacatatgctgaaggttttgactgtttctaatagttcttatggttttatattcttgccttctttttttgctttgattccatttggttattttgttttggaaagtctgtaagtactgttgaaatgttcttcaactattttgtcaaccttttcctctaagttttatcataattattttggagtcattgtttggtagcctcagtatctggaatgtttctggctttgctgagattgcctgttttatttattattgggttttggttttttttttactacttcctcacaggcctagtcagtttttattgtgagcaggacattatacgtgatatgttgcaggggttctggattatattatcttcctctcagaagggttgggtttttttctagtaggcacttatgttcctggcagatcactttcattcaatcaaggcttgaatttacaggggacctatttcaaattttccatgaatcctggtggattgccatatttcctagaatatgaatcttactcctgtagcatacttttctcacgtttcaattcagttctcagggttttcataaaagtatctcctttctgactgaatgaggcaacacatcccttcagtatttattatgcagtctctcttcaattcttagcaacttccctcccctccgaaactgttctctgttagttagacctgctgtcttctctgtgcatttgcagcttgggaatgagctaaggacccaaggaaatgcctgtacatttttgaggtgccatttccatgcagctgctttccttatagtatgcagctccaaaaccgccagatgctttggtagccctaaatcgtgagttgtttgtttgccatagcaagggtattgctgtctccttgggcttcacttctttgaattcttgagtgtgtatgggacatactttatatgcttctcttttcagagattacagtcctttgctgtttgttctcaatgcctgaaaatgataaaaactaaaacaaacaaacaataattccttactattatcaatcattaatcattgttcattttttcttaagtgagagcaagtttattaagacagtaaagaaataaaagaatggctactccataagcagagcagtggcatggactgcttgactgagtatacttacagttattttgtgattatttgctaaacaaggagtgaattattcatcagttttctgggtaagaggtgggcaattcctggaactgagggttcctcttctttttagaccatgtggggtaacttcctgatgttaccatggcatttgtaaactgtcatggcactggtaggagtgtcttttagcatgctaatgcactataattagcatatagtgagcagtgaggacgaccagaggtcactttcctcaccatcttggttttggtggtgtttgactgccttctctactgcatcctgttttatcaacaaggtctttgcgacctgtatcttgtgccgacctcctatctcatcccgtgactatgaattccttaaactcctggaaatgcagtctagtaggtctcagccctattttatccagcccctattcaagatggagttgctctggtttgaatgcctatggtttattaccccactcccttttacaaggggacctttaatcctaagggttgtagagggatgtcagtccattttctgtaactccttcaggatgaataggggtgatgatattcctgcctaactattagggtctcttgtattcagggtagagaggagcttagtcagaaagcgtcagtatggtgagacccgttcataactctgataaaaggtgatatccacagtctgccagttggtgctacagtctgtttcctatgggtcaggggttttctccgtatcgtccctgtggggtttgccaggaagatgttaccagaaaggattcctgatctagaccccaagagagggttcttggacctttcacaagaaagaatatggggtgagtccatacagtaaagtgaaagcaagtttattaagaaagtgaaagaatgaagaatggctactccataggcagagtggcccattgttcaaatttatttgtgaaagaaatggattgtttgttctgtagatcatcccacatcttggattttgctgtttatattctacatgccatttgtcatgttgtttgtaaactggtgcttataccaaaaagtttggttaaatccagggggttttatgtggtaaaaaataatcttttcaggagatacatgaaatctgcttttctattatgaagttaacattggtcagagtgttctgatctcctcaggttgaacttcccattaaaagcctcttttgcactttctctaatggttttagcattctttaggttcagtatttagatgagttattcattgagacctacaacatgataatagtttgattttattatttcttctttatttatttattatttgaagttctttaatggaatagaagttactcatatcagctatttggttgctctcatacagagatcatgtaggaaaggtaggataaatgcttgattttctctctttttcttttttttaaaaagtattcaaattaataacttggttccttagcattcttcaaaatggtcacttattccattttattttgttttgttttcgatatctgtacatttatatattatatcacatttgatgtgctttaatcaattctaggcatttaaaaatgaaacacttttccgtgttttgtttgttgtgtttgttaataatttgttttcaaaactctggaaaattttccagttagtttctgaacttgttttaaccaaactccagttacctttgaaagctcctttgctttctggtcagaaaagatgttctaggctcttcctgcacattatttacctcaggactgaaaaccctgatttccctaaagagctctgactttttctgtgggaaatggtatttagatctcacaatctgggtgctacggatggctattggtactgggtgtgtcatcgtctctagacctttcagtggacagaattagaaaaaacttttttgttgttttttaaagaaaaaataccctatatattcatagtgatcttacactatattggaatattgagattatagagttgctttttttttttttttttactttacatttctacctcttctctcatacagtaaaaatcctggttcccaatgacatgaacatattatttatgtacttagtcctactgtacatattttcaaaataacaatactaatattattactaatggtatgataactggaaaccatttaagatttctttgttcttttttgtgtatttaaaatatgttttgcttgagcggtatagtcaaattacagtgtttaaggtcccttggaatatttctactctctatggttgtcagctcaatgcaattatttcaccagtttcacttcagttgtgattttaaatatttctttcatttttctcaaattttgctttataattatgtaaaatatatttatagttccaaagccaaatcaatgggcatggtagattatgagaggtctagcttttttttttcctgtcccttccactctgttctttctcccccattagagaacagtttttattagtttttgatttatccttctatttaaaaattaagcaaatgatctcatataattgtattttcctctttcttagataaaagggagcataatatacacactggtctatagttggctttttttcacatcatatatcctggagattactccataatcagagcatagtatgccgctatgtgatgtctcattttctgttcaatcaatactctattgacggacatttggcttgtttccagtcctttggccattttctttttagtcttttgttttttatttttgagacagggtgcgatcgtgtctcacagcaacctcaacctcccaggctcaagtgatcctccttcctcagtctccccagtagctgggactacagacacgcaccaccatacccagctaatttttatttttttattttttgtagcgatggctgcccaggccgttcttaaactgggctcaaatgatattcctgcctcagcctcccaaagtgctgggactacaagcatgagacatcacacccagtcttgtttccaatcttttggaattccaaatgttactgcaacaaaataccttattcacttgtcgtattgtatttttgccaatgtacctttgcgatatctttccaatggtagtattgtttggtcaaaagaaaatgaaatgcataggtttttgctaggtattgctatattctcttatgtagtgatcgtaccatcttgcattctctagcaatgtgtgagaatgtctatgtccccacagcctctccaataatttgttttcaaaactctgcatttttaacattctgaggggtaagaaatggcatctcaattaaggttttatttgctccttctttgtgatgagtgaggttgaacatcctttcatatgtttaagagacatctgaacttttttcagtgcactctattcatgtctctattctttttagaagttctttatattttaggataataactctttgttgcatattgcattttttcttattttgtcattaatcttttcctttgcttatgctattttatgcatttaaaactggtaacttttaaagtattacattgggaaatgcctctttttctgaagaactgagatgttttctcagtaggaacaatgagactcatggaactaatttgtttcattttttactttggcaggaaaatttttatttgaacaacctgtatagctatgtaaatttcatatcttacacatctaaaatgttacctatctcacttatttctaatgtctgtattactacagtctggatttttattatttagtgtttctgtcatttgatttacagtagcatttctcatagaaatctaagccactacagattctttgttaaataaatgtgggtattaatgaagagcaggttcttccagtcactagtcagcaacgttagggggccgatgtggtataatgaggatggtagtggggtcagcatcagaaagcctggctcagtccctcacttgctccattcttggaacagtggctcgatcactacagacatttgaattttttcatttattaaatgaatgttttaactatatgatagtattaagaaaccttctcaaatgaaaattatgtcacacttaaccattttaatatgcaaagtgatctggtttgctgaaacacacagaggttggcagaagttctggaattctttacaatttcacatacagaaattaatatcatcaaagtgaaaaagatgactctacaatcctggtattcatcgctcagatggttcagccctgtttaaatagtgtcagcatgtgatggctcacaagcacagagcttgacacatgggtgattcatttgtttatcaattgatacttctagacttgtaactttataaaactggaaaatgtaaatcttttttaatttatgagggtgtctaaaactgctcatagttatttaaacaaagtttggcttcttacgccaagggctctgatcattctccataaattatagcatctatacaaatgtaacattatttttccctcttattttagagtgtggaggtatcctgactggtccttacggttctattaagtctccggggtatcctggaaactatcccccaggaagagattgtgtctggattgttgtaactagtcctgacctcctggtaacatttacttttgggaccttgagcctcgagcaccatgatgactgcaacaaagattaccttgaggtaaataattatatttagatagaacatatcacaatatgattaggactcagggcactatggtctagccatgcccatggatgaccccaaaatattagctgtagttaggtgtgtttctcaatagtcagtcaatatctaactcttgcaaagtctctatttttaactgtgcctgtttgttgcttcttcttctgggttccatttgaatctgggaaacagattaccttgccctgctatggtgttacctggaagctcacacccctgccatgagaatgcagaatttatgaaataaacactcagtaatagccatctccttcaatgcagattcaaaccttcagttgtctgtggtaaactggcaaggtctttcacagcttaactgtagcattccacgaagaggccgggtgtggtggctcaagcctgaaatccctgcactttgggaggccaaggtgggcagatcacttgaggttaggagttggagacagcctggccaacatggtgaaaacccatctctattaaaaatacaaaaactagctgggcgaggtggcgggtgcctgtaaccccagctactcgtcagtctgaggcaggagaatcgtttggacccgggaggcggaggttgcagtgagctgagatcgtgccactgcactccagcctgggtgacagagtgaggctctgtctaaaaaaaaaaaaaaaaaaaaaagaaaaagaaaaataatagtgattgtgttgaactgggttaggttcctggaataaagtaatcattattactgagaggagaggtatcagccgaagctccttctgcctacccattagtaaaagattaaaatatggaggaggagaaaaggctcttatattcaaatgccgtttgtacgtaggtgcatcaaaaagtgttgctcttcatttgtagactgacaagataatggagaagattgagttcccaggttgtcctgtattttttatcaccataaatctcagccccttgcagcagtgtgaaaaagacaatacgcatttccaagtccattagagaggaatagagtcaatgcaattattcataaaggatagaaggatgtggtgtcaaaaaggggctctgcaagtaaaagtcattagtaattcagcaataatggatttgaaacctttgggaatgactggaagatctgtctctctctggaaaatttctgcaaaatggtcatttaaatgttgacagaaaagtgagttatcttgaaattaattttcaataaattccatcaagttaaaattagaggctttaaaaaattcctacacattcatttctggagaccatatggtagaaagtgtcaaccactctgacaatattgaaatgtctctcatttctctttaaactacagtatttcaaagaaccagttaaatattagaataaagttatgctgccatctaactttgatcccagtaagaaaagtaatttgaatagacaaaattgaccatattaaaatattctttagttcattgactcctcggtggtttatatagtatagaatttgcaattacaacaaaattatagagagattgacatgattacatcatagattaaaaaccaacaattagaaaaggatttctaaggtcacgtcattatcattgtagtacttacttactatcaaagttgcatttttaaattcactaacctgtctttctgttgtgtctaatctgatggcacttcctctctacctctgacccttctgaaaacctggaccaagttatgaatcagttggcatcaatggtgttccttcttctgttttctttgcttatattcattttcttctagatcactaagaatttataatgaaaaaaatcaaaagggaaagatctttgattagtaacatcatgacaaaaattctaactatatgtccagccttggaattgaaatccagtcacaggccaggcgcggtggctcatgcctgtaatcccagcactttgggaggccgagatggtcagatcatgaggtcaagagattgagaccatcctggccaacatggtgaaaccctgtctctactaaaaatacaacaaatagctgggcgtggtggcaggtgcctgtagtcccagctacttgggaggctgaggcaggagaattgcttgaacctgggaggtggaggttgcagtcagctgagatcgcaccactgcactccagcctggtgacagagcaagactccatctcaaaaaaaaaaaaaaaaaaattcagacagagagaaggcattggggtgatgggagaaggagacacactttgctgaacctcagccatgagttacatttggatgtgatggggaaacttccttgagcgatcacttttaaatgatagattttatgaagttaatatccaaagtgacctagtttgttaaaaatctgaccactttgagcttaatgattcatccttttgttttagattcgagatggtcctttgtatcaggacccccttcttgggaagttctgcaccactttctctgtcccaccgctccagactactggcccctttgccagaattcacttccattcagactcccagattagtgaccaaggcttccatatcacctacttaacatcaccttgtaagtaacctaccagttgggggcttaagagggatttgaaggccaatgctatgcttacatctgttttatattttaatgtgattcagaggatgactgactgtcttagaccaagaacatttctttataaatatttctctcatagcttcatattttttctttatcttcccaatgctctattattaatactgcaataccctttgatccctaaattatgggatccacatcatgataaagatgtatgaggcacccaaacttaaataattcagggcaccaggtccctcgtggtgtttgatgtttagttgtgagagaggtttgtgcatgcgagcagtgcagtctctctggattttatcctcgggtcaagtccagctgcacaggggctggggctggcttccagcatcacagtgtcccagactctagagcttcacttccagccaaatactattagctgttaggacctcagttgctttgataccttaaaacaaacaaacaacaaaacacaggaaatactctatgatttggatttttttagggaagtggaggattttgtttatgacatctattattgtgcccttaataaatgttctcagaaaaagtaccttttaagtttcaatatcaggaagagtaacaaagaacatctttacttgtcccctttcttcatttccttttctttccacggaatctggtgccaacctcctgttcccctttcaattgttttccgtgcaaatcaactccccctggctacatcttgctattctgtattcattttttctttaatctgcttcatgtatacagttatgtagtttattttgttacatgtttttaataaccatctcaaatcttattgaaatgaagcagagcattaatgtatttaaaaagcaacttatagaagagaatggcagattggaagctagatcacacatctctgcatctatttctttaagccactacagagatgtcccacaacacatcaaactgaaaatcttaaaattagaggcacaagcctatagagggtgaataaaatggatatgtgcttgtgtgtgtgtgtgtgtgggtaaatttttagaaattggatccaatgcctgcaagccagagcaatgccattgccatgacctgttcgtctcttccctgttcttagcggatctgcgttgtggtgggaactacacggacccagagggtgaactcttcttgcctgagttgtctgggcctttcactcacaccaggcaatgcgtctatatgatgaagcagccccagggagaacaaatacaaatcaacttcacccacgtggagctgcaatgccagagtgacagttctcagaattacattgaggtaactttcactactcaatcgcccttagatgacattcatcaacatttttatattctgcagagtggtggtcttcaaaagattgttgggccaccagcagccagaatacctgagagcttgttagaaatacaataataactaagctctaatgactaaggtgcaggcaaataaggctgataggatgtactaataagatacagatttattatctagaataattaatacaggaaagaactcaacccagggaagtgaagggatttgcccagatgacccagctagtcaagtggtaataaagtttaagtgttgaatgacccttgttttggaggttagggtttttccttcctttattctgcttgctctcctccagaaatctttaattttgatttaagtgtgggtaatgattgtaatacagggaatatttgaaacagagacaggctgtttttgtttgctgggcctggtatttcttatgctaaattattggtcaagccacaaattaaagtgttgagcaagataaaacattgtttttttgggcataatcattttacataaactagagaagaatttacaattttgtttgtttgtgcaagttaaatccatttattcatccaggaaaaacctatgtgacctcctgtcctcttctttctacatttagacagaggaaacagaactttagcataagatctagctagacttagttgaagtgcattgaccatagcactacagcagtatgtatgtatgtatgtatgtatgtatgtatttatttattttgagacggagtttcgctcttgttgcccaggctagagtacaatgtcatgatctcagctcaccacaacctctgcctcctgagttcaagcaattcttctgcctcagcctcctgagtagctgggattacaggcatgtgccaccacgcccggctaattttgcatttttagtagagatgagatttctccatgatgggcaggctggtctcaaactcccaacctcaggtgatcctccggcctcagcctcccaaagtgctgggattacaggcatgagctactgcaaccggcctgcattttttttaatccagaaatttttatttaagatcatttcagaatgggtatatttattcaatttaggttttctaaagtctcttataaagtatattaaagttttacactacggaagaatttcaaatatttttatgtaaatcaaaattaaattattaacccttttttttttaacttttgagaacagcaaaaatagctttcaattagagagtgcttcctgtactccaggcactattataagactttaaaatagtataacaaattaaatagataatgatcattgtcagcttactgcctgccatgtgtggtaagtgcttttcgtgagttatttcattgaatcctctcaacaaccattattatttctgttttaatcttaggaaactgtagcccagagaagttacttgtccatggttacatgtctagcaagtaatggagctgggattcaaatttaggagatctagttatacttatcttcagtaagaacagaaatgcaattgtgtgacgttgactacaagaggtgtctcatcttccatagggaggaaggtcttgtgaattacccaattccatacctggctctccgatcacgagactaaaacatgaagccgagcatcatgattttctcagatacgcaagaatgtaactataattttcagggaaatttggggccctttctgttaaagccttcatggtgattctctggttctaaagaactatcagtacctctgaatggttcatcctctcaggctttgcagaacactagaactgaatttcagtgagcggttccatgaactcctctgaattcttctgaaaagtttgcacaaaaaatcataaaactggctttggaagttttaatttcataaaccagaatggtggaatgttttgtagccagaaggggattaaagttagttcacctaacttcttattttagttcatttgtcagatgaccgtataaccttggacaattctttatctggatctttcagttcctacttcagtaagatgtcctatctatttctctaaactttgggggtagaatcaaggaaataaatgataaaaagaagcttgaagtgttaaaaaaaataatgcaaatgcaaggtttttctggaacaaagttttaactctagccttgaatttatcagttcagagacagccgatgtggctgtcacagttggccagcgaggtatctacattctgatgtaaccacatatcctcaaagtcttgaccaaatttccctcaaggattgttgatggaaaaaaaaactgtattattcagaaggagaggtcatgtacggtgatttaaatattaatagatagatttttatattatatctttgaccaaccaacctaaaggaatacaaccaacctgtagaattttggcatcagcaaggaccttaattttacaaatgagaaaattgaggctcacaaaggtcaaactctagttattgtcaaagtaaaacttagatgtacctctatgagattctagatggacgtacattgactttggttaaagctcttgtctttaaatcatctctatccattgggaaaatttgtgaactgaacccgttttctaaaaagtatattcacttctcttgttgttcttcagatagtggtcatacaagaaagtgatacaggaaccaaattctaatgacattattatgactcaatatattgttccctaaaatgatgtcttcattttttaaagctatctctaaaaaatgaaatatttatgaaaaagaattaaaaaaagaatgttggtatttcaaatactttggtggtttagaggggggttgactttgtcctttactgactccattgatgagtaaaagcagtccacccaaaattttagaaagagtggagaagagaaaagaaattctacagagatgtgggagaatgatcctaaggacatttactttgcatgtgaataggtgtacttttaagaatcctagatcttctctttgtgtggttttaggtgccttggttgccaggcaaacatatccttcaaatgaagattaaggtaccattgctgagtgtgtatctttcacagatactgtggttttgaaagacttacttttgctcagtaagagagttccataagcactcattaaagaatagattttaactgcaaaagataagaatgatattgacccagtgtagcatatctttctttttttttaacacaaggaacacacattaacatgttaattcttagatttatatatctctcttaagtgaagtttctacttttaaagatatacattacccatggaagatgtgacatggctacaaatgaatgaatacaagaacagatcaattgttagttcatctgtttttgtcgaagagagcttttaaattgtatagaatagttcaatgaaggtgatggaagcatctttccagaataaaaagcagcacctctcattaatatttcataagtgatttaagccatcagaactctgagtgaaggacacataggtagtaatgaaagtttaattttaaatcccagagaagggaagttgtaggctgaataataaattcagaaggctatacgatgttaaggtgaaggcttgaggtaggatacgaagggaaatgagtagaattgttcacccatcaaatctccttgaccaatcccaaagtatctgcctcctctccccagagacactgaggaaccagaaagggggctctacaagagacgcagggagagcgatgtgccttctggagaaagagaagggctttcgagaagttgttgtttcttagatgtggaaagcaaatacaaacagaaaagttgaaaaatataatcaataagacaggaaggagtaatttacattgaattttatttctgaaatctagggaatatacctgttctacaagtggcgttgaaccctaattcatcatattttagacctctatggcaatcccagtaaattaacaaagcagaaattgtacatctcttcacaatataacataacccaagattatttataaacattttaaaatgcccaagtgtgtggaagtatgtgaactctccaaaataatcattggcttgagaaagaaataaaaaatgaaagactacatagaaaatgacaaacaggaaatgctgtgtatcaaaacctgtgagatgtgatgaaactcaactccctggtaaaatctttaagatttaaaagaagagaaccaaaataattgggaaagcaggagagcagaagctgaggcaggaaggtctgtcctccgtctgaaccttttctttcaccaccttcccctgcatccttccctctacttctccctccccgctacactcctgcttcagcctaagcagccctcccgcatctcctgcatgtctttagatgaatgcaaattcacaaaggacctccttttgtgacttcttaggcattgagatgattccactatgagcttgggattgggtgggggagagccaggacttgtggaatgcatgaggcacttgcttccctcaagtggacctgctgctcagagtctcatggctgcaattcacagactacacacctaaatgtcagaaaaagaataaggcctggagcaagcaaacacaccacataggctgaatagtattgtgtttttcagttaagtacatattgaaattaattgtaggtcagaaaaatatctttctagagagggtaggataaagggaaaagggggagatcctcaagagtttgtactcttggccaggcatggtggctcatgcctgtaactccagcactttgggaggctgaggtgggtggatcacctgaggtcaggagtttgagaccagcctggccaacgtggtgtgaaaccccatctctactaaaaatacaaaaaagtagccaagtgtgatggtgggcacctgtaatcccagctacttgggaggctgaggcaggagaatcacttgaatccaagaggtggaggttgcagtgagctgaaatcacgccactatactccagcttgggtgacagagtgagactccatctaaaaaaaaaaaaaaaaaaagagtttgcattcttgagcatattggatttagggttttgacagagactaggaacatttggttagactctgagctctgttgttgtgagcacagtttttccacaactgctggaccatcgtgatgctttttagtgaaggaagaagataggccattcctctagtgaaataattctgtaggttggagtagtgggaggcaggaaacagactgagagatgatagaacacctaatttggagttgtgagaacttgtagagaatacatttttgctgtgtttgaaggagttgcatgctcatgtagaagctgcaaacccattgaacatgcgtgatgtagagcagtaagcaggaataagaggatatggatggaccattatcaagaacattacaaattcctaggtcaaatagagggtatggctggtacttttctgatataaaatggaaacaatattgcatggaaacatgataaaacccttcagctctctgtgttactaaaggcaagatacctgtaagccacagcttcctcatgtgtaatagggatagtactagtagtactagtagaaagagaccattcattcatttatctattcattctctaaatatttatcaaaccacttaggtttcagtcaccatgctagggaatgggtatgtaatatagatattaaataagtaagcacacactacataatttcaagaggagataagtatgggcaggaaagaaacagtactgtaagagaaaagaacagagctactgacttcagtggagcagtctgagtttgcttctcaagggtctttgtatggctagctcattctcatctgtagaccctgtatgtaggatctgcagatgaggagtgagcaatgcaaagaactgagagaaggaggactccaggtagtggtgctaacccagccctagagactgaagtcagaaaaaataaactaaaataattggaaatagaccagggtggctggaatcacacagggatggaaaagagaaatatgagttaggcaggagctagaccctgaagggtcttgtagaccgagataaagagcctgggttatattctatatgcaaggacaaacaattagaatgttccttgtcacattgtgcctgtcacacaatgaatgctcactaaagttaacatcatgatgataatgacgatgatgatgatgatgatggggaggagaagagagggcaggagaaggtgacctactggagtttgcaatcatgagggaaggcacttctaggtaaaacttattcatgtgttcttgattttagaatatcagatcttaaaagatcagattatatttattaatagagatgttagaagggacactttcacaaggcatgaaaaggtttaaaataccaactctaaaaatcatgaaacatactaataaagaacaaaggataataaccaaagtaaatgattttgagatcctaaatggcttctctcatctcttatcctcctcaccccttattctctcactgggggcagggcctcattcctctcctgctcacccagattagcccaaggctcctccctaaggtccagtctttacttagctaagatgtatgtcagcctgaagctcacttcacagaaagccacatgttaaacactaccatacggtgtggttctcttttcagctctcagatggactaagcgtaagtgccagcatatttgaattgctttgaattaaaatttaatgcttattattttagaaattatagtataaaaccaaatctggattcatagcagaggaagacaaatgagcgtgcgtattaagacatggctttgggacttgactcattccagatgttaaagctcacgactcactaggctcaaaagcccacatttaaaatttcatgtaaatggtgtttctcagcaaagtaaattttagttctctctatagaaaatcattcctttacaaaaactcgtttttttttatgagtagtttctcttctggaactagtttaatctgatgaatgtaaaaattggaagccatttggaatacaccatatgctgaacatcctgggacctgaaaccttcagtgtttcctggacgaataaggcaatccacaagaaatctgaacctggtccgtgaaacactagaattttgaattggttcttgttgtttccttgcaaatgcgattcactaaaaagaatgaattcactgtgactcctctgcaagtgatcacggcatggcttcacctgacttagaaaaattcagtttttctgcacaaaccagactcagatattggtcatctttctctaggttatgctgcaataacaaacaattagtagcaacaaccagaaaaatcaaaaacaataacaaaccaaaagcgtctgtggctttcaataacgtgtttattctttgctcacaatagcaggttagttttggatccattgcagttctgtttcctatgtcagtttcctgtgccttcaccgtcctgagacccaggctctagagcttgctgggggaaaagtaaaagatggttgaattatgcagtgacttccaaagcttctatgtggaaattggtgtatcacttttgctcacactctgttgggcaaagcaagtcctatggctaagcccatagtcaatgggaagattatgtattaattctccgtatggcagtattgcaagtcacatggcaaaaagcatagatagtcaatccttttacaggaagggaagtgaataactatgtaaaataatgccatccatcccagttcatgagcataaaggaaagaggtttttttttttttttttttggtgggggtgcaaatttatcaagtcctagattattgaacgcaatacatgcttcagaggtagctagggtcactttagaacatttgatgaattttattctagtgtctctttcaaaggagttgtagttaaagtattgccatgtctagaatccagggagaatacaggctttcagaattaataaggtttcatttccacagagagagagagaaacagagccaaaatcaattgcaccttctaggttcagggcccttgagccctatgagttcctcttaaaacatttggactacagctgcctttctccttgttaaaatccttgaatttcattagttggggcccaggggaatggcccactttagcttgcagtgatgctatttggctgttttttttccttcttgtcatcttctaatgggcgaaatagaaaagagagactacaatcttcgaagaagcaaatagaaccctggaggattagagagcaggaagataactttgtgtttcatgctttctagttttcaagaactgcagtatgtctgtatctctaacaaaaactgaaccatcatactgtaccttaaaattaatgaatcaacaagaatttgtcaaatacctatttgcaaagttttttttattagatgctgaagggcaaacagaaatttttcccttccctcagagacttactgtttggttagagataaatttagcatagctttactacaatatgtgaaatttgtgttacagatgttgtaagagctcagagaaaggaactagtatgagcctgagtcagtggagaggcatgtgatttttcatgtctgtgtcagactctatcatatggctgaatcattatttatttaatcacctcactattattaggcctttagaatggtttcaattattgttattatagagcagactttgatgtggatctgtatatgtcttttcctgcatcttgaatatccttgtgatacagtgttagaagtgaaatacccttaatacatattgtcagtttattttccagaactttatacttccaccagttatggatgagagtaactgtcgccacatccctaccaactttgaatatcatccttttaaaatctttcctttactggctaggcacggtggttcacatctgtaatcccagcactttaggaggccaaggcaggcagatcacctcaggtcaagagttcaagaccagcctggccaacatagtgaaaccccatctctactaaaaatacaaaaattagctgggcgtggtggcgtgcccttgcagtctcagctatttgggaggctgaggcaggagaattgcttgaatctgggaggcggaggttgcagtgatccgagatcgtgccactgcactccagcctaggtgacagagtgagacttcatctcaaaaaaaaaaaaaaaaaaaaaaaaaaaagaaaacaaagaaaaatcttctctttactacctgtttgccttggcctagataactcctactcagctttcaagtctccgcttaaatgttatttccactgagttttccataatcccctgggtgagttcagagtctttggttaacccagtggttctctacaatttaagactttttaatatcactccttgattattcagaaatgaaatacactgatttaaccccactagacacattatatttaaaaatatgtaaagttgtaagaataacattaagaaaaaatagagtaacagaataaaatcacatttatttcagtatctgaaaacctaggcaagctgtacttgaagacaaaataaagcagttgattgtctggaccccaaattgctatgaatatgacagtacaaatgcaggctgacacagttatgtgggttggtgactaatttttcagaaatagtgactaactcttgacagatttccaggagaaagaatcttcaatttacactctacttgtaatcctggaaaattcagtatgcattaaaattgcacaaaactactttgcgcttaatatgtaaaatagagcgagattttatacccaataacagaactttcacttatgtgaatgtcacacaggttcaggagaattcttgttgtgtgtgacgctcacatttcaggctgcctcgtgtctttggtcccttgctacttactaaatgccagtaatgccccatgattgctgtgataataattaacacaaaaccaaaaaggtactctcacacatttcccaaatgctagattgtggtccctgctgagaaccattggttaggtaacaatgaagtatcctgcgcttccccaaaaaccgcagtcatcatacttttcaaaaatgttcctgcctattgtaagttccttgtgagcagtgactgtttcatggtattgtcacctgcacagttcctggcatttattcatgccttgataatgttaatgaagtgaatgaattaatatttggatgtctgtatccttcagaataattgtactgaacagcggcggtatatatatccatcgaataattcctgctcatagtagcaagcctccagtgtttcacctccaaaaatgtccagaataacaacagctatccttagtcaacattttccattaccaaacatttggctaaggaattcacactattgtttcatctgtttgcttcaacaatcccatgagcttagatagagtaacttgctcaaggctattaagtgaggtggtttgtaagtgacagaggtaggttttgaacccaagtccatagactgtattcatggccactatactataagagctggctatttggccgggcgcagtggctcacgcgtgtaatcccagcactttgggagtccgaggtgggtggatcacctgagattgggagtttgagaccagcctgaccaacataaagaaaccccgtctctactaaaaatacaaaactagctgggcgtggtggcacatgcctgtaatcccagctacttgggaggctgaggcaggagaatcacttgaacccaggaggcagaggttgcggtgaactgagatcacgccattgcactccagcctgggtgacaagagcgaaactccatctcaaaaaaaaaaaaaaaaaaagagctggttattgatttaaaatcagtagtctattatatgaaggaaattccttttttttctaataaaacaggaatgctaacaatgttttttgaatttatggagttatcatatggcttatcttatctgatgtactgaggaagttaatttatagtttataatttctaacctttcttgcactattattattcccatatttgatctggtatataagctggcaatggactgtgaatttatttttctagaactgtgtttaggatttgtgtatctatattaataggtgacatcagtctatagtttttatttctataatctatgttgggatttggtaacagcgttctaacaaaaattatttggaaattattctatgtttgaggatggcttagaataaattatacatgggaattatctcttccttaaaagttttaaagaatgtactaagtagagcatcttatgggagatttttctttttgggggttgagggtgggatgggaataattatttgataatgttttcaattttatttatgacttatgtctgttcaaatcttatttttcttctccttcagataattttaatgttatactttttctgaaaataacccattaaaaacattcatagagttgtacatagatttcacatttaaaaaaatcttagtatctgtgtctttgtcattttcaattttgtatatttgtgcttatatatttattttctttttagacttgccagagatttgtcttttatatccccacccataaccttcctcaaaaaaacagttcttgaatgtatttatgaataccacatgattttgtatttcatttattaagttttgctcttctttttactgtattcttcctcattttaaggatttttttctaacttaaaaaaattgtacatagagctgggtctcactgtgttgcctaggctgtctccaattcctctcaccttggcctcccaaggtgctcagataataggtgtgtgccactgtccctggccttctttctaagtttttaagttgactccttacattcttttactttctctctctttcatcaacttttcttttttttccttttttctttcaatggcaaaagtagtttagtccataactttctttgattgcagatttggctaacacgtgtattttttcataggtaatattctcattttttattgttttccaagtagtctaaattgtgaatttatttcctctttgacattgtgaaaattattaggagaacattctttaaattcttgtgcttttggactttattggcttaggattttatcagcatttcatgttattgcattgtgcttaaaaatgacctactgctttagaaaataatagaaatatgtaactcaaattggattatcattcattttgaatctgccattttttcatctccaagtaacgccaccattgccgacgtaagtttctttatttgaattacatctctattttatttttctctttaggttcgagatggtgaaaccttacttggaaaagtctgtggcaacggaaccatctctcacattaaatccattactaatagtgtctggatcaggtttaaaatagatgcttctgttgaaaaagctagtttcagagctgtttatcaagtcggtaaggaaacatataatttttaaatgtctaatttgcctgattgtaatattttaattcttcaaaataatttagtcattttatgtcctcaagtgttaagtggaaaatattctcatagaaatgttatattcggttatctcctcaggcagtattagattttgcaataaaattgagataaaattattaatatctggacaagcactactataatttttatgcttacagcttgcggggatgaattaactggagaaggggtcattcgctcgcctttttttcctaacgtgtatcctggagaaagaacctgtaggtggaccatccaccagccccaaagccaagtcattctcctcaacttcactgtctttgaaattggaagttctgcccactgtgaaacagattatgttgaggtaagagggaaaaaatctttgaatttgtatttggttgtatattataaaaaatattatgggttgttgtcttcaaatctgttataggaaatgaaagtagtttatgtagaccaatatgtcttatggatacatatgtaaaaatcctcagcaaaatactggttcagtgaatctagcacaaaaagaggatttatataccatgattaagtgagatttgtcccgagaattctaggttgatataaaaccccagaatcagttaatgtgatacatggtaccaataaaataaagaacaaaaactccatgatcacctcaatagatgtgagatctggattttgctggatttgacaaaattcaacatcctttcatgatgaaacactcaacaaactaggagtagaaggaaccttccttaatctcataatggacattcatttaaaaactcacatctaacatcatatttaattatgaaacactaaatgctttgcccctatggtcacaaaaagacaagaacgtctgttctcactacttctattcagcattacactggaaattctagctagagcaattaagtaaggagaagagataaaatgcatccagaatgaaagggaacgagtaaaattctctctattcacagataacatgaccttgtatataggaaatcataaggaatccacacacataaaaaactattagaactaatccattcagcaagttgtgggttatgagatcaaaatatagaaatctttctttttctatacaccagcaatgaacaatttgaaaatgaaatcaaggaaacaattccatttacaatagcattaaaaaataataaacatgaaggaatacagttttaaaaataagtgtaaaacttgtcctctgagactataaaacgtccttgaaagaaatttaaaaagacctaaataaatggaaagacatttaatgttcatggattagaagacaatattgttaagatggcaatactccctaaagtgagctaaagattcaattcaatccccataaaaatcacagcgggctcttttaaaaaaatacataagctgatcgtaaaattcatatgaatatgcaagggaaccagaataaccaaaatgttcttgaaaaattacaaagttgaaggactcacacttcctgatttcaaaacttagaacaaagctacaataatcaagacagtatcttattgaagtaaggatataaatatagatctatggaacacaattgcaagtccagaagtgaacacatacttttatggccaattgatatatgaaaatgatgccaaaacatatcaatggagaaaaatcattttttcaacaaatggtgctcaatagccacatgcaaaattatggtgctggaccccttccttatagcatacacaaaaattaactaaaaatggattatagacctaaatgtcagagctaaaaccatgaaactcttaggagaaacctaggagtagtctctatgcccttcagtttaggcaaagccttcttaaatatgacacaaaaagtacaaacaaaaaaagaaaaaagaaaaataacttcctcaaaattaaaaacgaataacttgatttttaaaatgggcaaaggaggctgagcacagtggctcacacctcatcccagcactttaagaggtcaaggtggatgaattacttgagctcaggagttcgagaccagcctgggcaacatagtgagaccccatctctacaaaaaattttaaaaatagctgagtgtggtaatacacgcctgtagcctcagctactcagaaggctgtggtaggaggatcacttgagcctgggaggtagaggctgcagtgagctatgattgtgccattgcaccctagcctgggtaacagagtgagaccctgtatcaaaaaaaagaaatgccaaaaacaaaaggacacacccataggatagctataataaaaagagtcagataatggtgtggacaaggatgtggagaaattggaacctttatacactcctggtggagatgtaaactggtacagccaccttgaaaaacagttggcagttcctcaaaaagttaaacatagagatactatctgatccagcaattctacttttagatatattctcaaggggaatgaaaatatatgtccacacaaaaatttgtatgtgaatatatctacagtcatcatctataataacatatacaaatagcaaaatgcaatcattatttttaattttaaaagtagaaacaacttaagtgtccatcaactggtaaacggataaataaaatgtggtatatctttacagtggaatattacaaggcattaaaaaagaatgaaataatgatccatgctacaacgtggatgaactttgaaaatgttatacagtgtgaaagaagctaatcacaaaagaccccatattgtataatcccattttgtttgaaatgtccaaaatgggcaatctacagagacagaaagtagattagtggctgcctggggctgtggtttcaggggaatgaggagtgactgctaaaggatatgagtgttttttggggggtgactaaaatgtgctaaaattgattgtattctcaaattgatttgtactccattaaaaacatttcagaaataattattcttgaagcagttttcaaaattgatatacaacatatttgaacatatcttctctaattttagattggtagcagttccattttgggttctcctgaaaataaaaagtattgcggtacagacataccttcatttataacatctgtgtacaattttctttatgtcacattcgtgaaaagttcttctactgaaaaccatggtttcatggctaagttcagtgctgaggatttgggtaagagactgttcccttttttttttcctcctcttgggcttgtatcagaataagtgaatgatagaaataaattatatgaaaatcatctgtactgtgaaaaattttaaagtacactcaaagacaaagaatgtatattttctaatcaacatttatatcaaaagttaattgttacttattaataagagaaaaatcaggttatcttaagtggcaactaagaaacatttttccttttaatctttgaagaggttattatcagagccttttaatttgaaatccaggtagcttggttacttgctgcagtaattataatttttatttcaacagcatgtggagaaattcttacagaatcaacagggaccattcaaagtcctggccatccaaatgtctacccccacggtatcaactgtacttggcatatattagtccaacctaatcacctgattcatttaatgttcgaaacatttcatctggagtttcattacaattgcacaaacgactacttggaagtttatgacaccgactctgagacatcccttggaaggtaaggttatgtttgtttgtttgtttaacaataaaacttcactgatttcctgcttcagtgaaggatcttaaaattgaccacgttgtgttatgaaaaccaggtgagatcctcatgcttcttaatgaccatttctacataactactctgtagttgtggccttgtaggcattaagttttgacatctgtatatattcatgaagtcaaaaccaaaattaaaataatgcatatatccactacccacaaaactttcttcctttccgttataattccttgcttttgttcctcacccccacccacaggaaaccacaaatctactttctatctctgtagattcgtttgcatatcatctaaatggaatcatactatacgtactgaatgtttttctgactttcctcaattagcataatttttgttgagcttcttggatccgaagatttgtagttttatcaaattgaaacattcttggccactggttcttaaaatatttttctgtctttcctccccattagggactctgatttcatgtatattaggcacttgaaattgttctacaactctcttgatagtctgtttgatttcaagcctctgttctctgtgtgttttactttggaaagttcctattactatatattcaagttcactcatcttttcttatgcaatgtctaatctgctattaactttaccaagtgtatttttcatcttagatattgtagttttcattttagaagttcaatttgagtcattttatatgtagtccatgtctctactttacacatgaattttttttctctagcttaaaaaatctgtgagatatagttgtagctattttaatgactttatctactaattcagacatttggattgtttcctgctatggttttatagattgatttttcctctctttctgagttatactttcccacgtcttttcatgtctgggtaatattcagtgggataccagacattttcaattttatgtttttggctgctggacattgtcatattcctgtaagtattcatgagcgttgttctggaaagcagttaagctacttggaaacaggttgatccatttcagttttgcctttaaactcatttgtttcctgtctctgaaggtttgttgtcctacattgcttgatatccagtgttttgagagccattgttttatacgtttttgtccaggatttttgttgtttcaggtgcaaagttaaatctagcctgttattacatttctgttggaaatggaaatcttttgatattttaaaatgtctttatcttgcattttattttctttatttctcattcatgttttaaatatccttcttatcctaatctttcatctttttaactttcttctttttcttttttgggaaggtacttaacacatcaccactgcaaaatacagaacgtttgctgaatggcataaactataatgatcttccccaaatttcatatacatgggcatatacgaaggcatttaaaatatcaattagttcacctacctttattttgatgaagatattaaattttttttcacactgcaatggtattatacaccaaattttctttctttttctcctttagcaattgacgtatccatttcccgtactcaacatttcctctctttttggtttctatatttgttttctttatcatttcttttggttaattttaccaagtgtgctttgatttgagattcctattttattgtcacttcttcctacaggtatttctccagataaaagctcatggcattctgtcttttatcacaactctctttttaacattaatagaatagtttttctgagctaaactgcttttgttcagcagaaacatggcatggctgaatcatcactcttatctctttataagtgagctgtttaaggacaatagattccctctataggggttacgattgtaggcactgttctaagtgctttatatacagggtattaactcatcacattctcaaaacaactctatgaagtaggtactgtcatcattcccattttagggatgaggaaggcaaggcacagggattgagtgatctatgagtttagattagagagatgactctatgattttatgatatattgtttccctttgttgtataagtttattacatttctattaaaaagtgtattaatatgctatatggcaatctagtgtagcttttattaaacttctcatacatgacaactcacatagccagtcacatacctaaaaccatttcagggatataatcatgaacgggacaatctttcgtaagtttgcaaatcttttttgcctgaaatatatttgtgttttaaggttgatgagaggtagagaacaaaacctattattatatttacatgtccaaatttttgttacatcattttcagtataccaaactaaaatacacacatctgtcctttcttggtttggaatagatactgtggaaagtcgatcccgccatctctcacaagcagtggtaactcattgatgctggtgtttgtgactgactccgacctcgcttatgaaggcttcttaataaactatgaagcaatcagtgcagcaacaggtaacaaaacagcattgcatactcggttttattgactccattgcaaaacagtgctaatagctaaaacacaatgagaatacatcatccgcaaacctgtggcacacaatgagagctatatttagaataaagggtagtgacttaaataccttccttattaaaagtagtgactagataagaatattgtgtcaatattaaatcttctaatgttggtaattgtactgtggttttgttaaaagaacgttttttcttcccttaggaacaatacactgaagttttcagacggtaaagaaatataatgtctccaaagtactctgaattggctgagataataagtgtgaatatttgtgtgtctgtgcatgtgtgtgtggggggggggggagagagagagagaaatgataaagtaatgggagcagaatacaaatacataataaatctgggtaaaaagaattcaggagctcattcttgcatcttttaaaattctatcagaatgaaaagttaccaaagagactgaatacttatgttaagaaattagaaacagaataacaatgtataaaaattagagactaccgcatgaaattccagggaaaggaatggaagatttcttggcaaaatatgcatttctcaatttgacctaatgaagttaaacttttcagcatttattcctttcattgtatttttcctattacttaatttctcattattactatgccctttgcaaatgaagtataggaaacaaatcccttttgcaggcacagtctttgaggtaagatgtgaaccagagatgctcccagccccaagagcctgtgcatgggattgatgaaggagtcatatttcgttaggctcatgtttccctaggatgtgttgttttttagagactctgagctttccttttgcatcattgtattaaaggacccaaataacatccagcatagacccatagtaggcatatggtgaccatgcttccaagcatttctccgctttgggattaccccagcagcatggtacaattcactgagctccctccagaaagaactggtagcttttcctatgttgggacatgcaccctgtgacacactctggcatcctgagaaccccagatgcttatcttttaaagtccccactccctaaaataaataaaagtttaaacatctcccactcaaaatcttacccaatttcccatttatttctccttcagaggggctggccactactcttcatttcaggcaaaactctgcagcagttcaagttctatgttcaaaagcatggctttagatttgctccagaatcctgagtgtgagagaatcaatcaatacttttctcccaggtaggaacctctgcaggagcagttcattatccagctcaagtgcaagcacatgcgaaatggaatccctggcagttacaataggctatggtgtgtgattgacgtattcactggacttcattcaggtggttaacatccagtgaccaaaattggtttcttaagaaattatagggtgcacacaatttttcatgctgttgtagttttatctgtctggtatgtttggccccaaagcacactgaatattagatcaggatttggagcaagtcacttgaactctctaggccacagttttctcatctgtaaaattaaggaattggatttggtaatcttcgagagatgacttctggctttaatcatctatgaacataattttaatttggtgcatgaataaactggctgtatcttagataacatataatacaggcagggcctcctgaaaatgtggaaatctttgtaatgatatgcaaagtaagacatacctttgtaaaacaattctattaccatcctagcttgtaaggcaatattttgtgcagaaagaacccagagcagttaaaataattgggcagggaggatattagattttaattctaaaagttttcagaaagataagatacacgtaaaataaaaatgagtcaggaaaagagatagaagcaaactggacaggaaaggaaactataaagaaagagagaagaaaaagcaagcaataaaagtgaaggggagacgatgttttcatagaaactcaaaagattctccagctggcttccctgtgtgataatcattactttggcctctatttggtctgcataaggctgaaatcacagacgagggagtgtttgctttctgtccctgggctgagcccggctggtcactgtgcccgcttgttgttggatgaactcataggtctgactaacacagtcaagccattctaaatagcaatcagatgacgagatccaggaagacacaacacaccttctgtttataattctggagcctgtcacagtttcccatagatcaagacctgagagatcggctctcatgcattgctgagggggggtcctgcagcattttttagggaagggctggtgtcaggagactgagctggtgttgggctggtgacaccaggtggtgggctagtactttaaggcagtggctagacctagaaggcagccagagtcagagtgagctgctggtgtggaaacacagagatgctaggactcattcttttcaggtgtcatcgtatgttggatattttctgcagaataaaatagcatcagggaaaagcatcaagggaagctcagtcatttgccctcatcttactttattgttctaacagaagttatttccagagcagtaatgttggtatttggttgttgatttctagctcctcagcccaacaggtgtgagtttgcctgctgaagtctttcttgtcttcatctgataaaggttaagtttccggatttgagttcagatacttttccatctgtagtttgtgccatgtggctatgatgtcagccccaaaatatgtgtttgggagaaaaaagattggtttcttgtgattactgggacttcctcccttgttactttgtttctgcctttatccagatgtgcctgggaaaacagaaagaaaagaactaacaagtacaggtttaacaggttaaaactcttacgaagttcttagaaactacaagactaagctttaatttaacgtattagattttgctcattcaaactacaaaatatttgaatcctgagagactataattgactaatgttatcaatttaaagtaaaattttatattctattaacatgtattgcatatacattaatatataatcctgctaagagggaactttaaaagtataaacagggacagataaatgtaccggattcattttcaactttaatattagaggaaaacctatgtaacatctagtccagtgcttttcaaactgcaattcatgactcattcgtgagtcatgaaattaatttattcggttgctacttgtgattgctaaaagtatggagtaggatagaaaggaataggagagaaagtatcagagtttatcatacaaagtaaggtgccgcttcatgagaactgtttgtagtatctccgcgcatgggtggctaacgtaaatgtattttttagggtatgtcaagaaagtttgaagcacaaatctattccagttaccttaatttttaaatgagggagatagaagtctaggatgttgaatttatcctcccaagaatacatagctgattggtttgaaagtcagactaaacaactgagtcccgtcttagaatccattgcttttgccatgtctaggttagctcttagaaacgctctaaatgaactgcatataacagctagtaacatttaattcagggctatcatcaaactgtggtggatttttcatatttcctgcaaagcgaaaaccttcacaattgtccagggaaatggccaaggatgatcccaacaacaacaacacaggattagagatgagccctactgggctttcttggcctccctccttcccagggcagggttcccacctactcatcagtgggtggttagtgctgttttttatcagtgatcctggaatgagctcagaagaggcatctagcagtgcaaagttaagaaatgatgacaaacatgcccaaagaggccttctttacactaaacgggtaaagagagttctgtttctattttaaaacttcagtttgggagtgtagtgttctcaaattctagtgttcataaggaatttgagatgggggattttcttgctataaattcaggcatctgggccccacccagaaattctgattaaaataggtctagggtgcttgttcgccaagcaattcaaggggttctaatgaaactttgtagtttatcaaggactctgaaagtcaagccttagcatgtgaattgctgtagaattacaagggagatacaatagtggattggactgtaactgctcatgatggaaagtactattcatgacacagggaaaggggatgctgtagggaggtcagaagtcttggtcctactctcagccttgatactaattaggaatacttttgtttgtttgtttttgggttttttttgttgttgtttttgttgtttgttggtttgttttttgagatggagtttcactcttgttgcccaggctggagtgcaatggcaatatctcagctcactgcaacctctgcctcctaggttcaagtgattctcctgcctcagcctcccaagtagctgggattacaggcatggtcaccatgcctggctaattttgtatttttagtagagacagggtttcaccgtgttggtcaggctggtcctgaactcctgacctcaggtgatccccccgcctcagcctcccaaagtgctgttattacaggcatgagccaccgcacccagccataatttggaatactttggacaactcacaagcctctctgattatttctatcgaccttgaattctgtattctttgctatgagagattcagatattttccctctggaaaaggtgttgtagtaagtcgattcgtcttttaaagatttactttcttactggctagtgttttctcataattttgtatgtacaggtgtcccagcacttctctgctcagttcgtttatcttgtttgttatatttcttactccttagaataaaaatgcaacaaaatgcttaatcatgatattctgagttccctacttgtcttcatccttaaattgacatttcctgtgtagaaaaaccagggattgtggccaggcagggtggcttatgcctgtaatcccagcactttgggaggctgaggcagtcggatcacctgagatcgggagttcgagaccagcctgaccaacatggagaaacccagtttctactaaaaatacaaaattagccaggcgtggtggctcatgcctgtaatcccagccacttgggaggctgaggcaggagaattgcttgaacctgggaggcggaggttgcggtgagagaaaatcgcaccactgcactccagcctgggcaacaagagcgaaactccatgaaaaaaaaaagaaaaagaaaagaaaaaccagggattgttaaagagaataggatttggaaagagggaacttgggttcatattttatcttggccatgtctgaagttaagtgtcttttagaatttaatctccaggaacctgagatctctcatctacacctctctaaaaagtgtggtgataatgcctggctgttttgcaaagttgaggaagacaaaatgagacattcaatgtgaaaattacattagagttgtaaaggaccatgactttgccagatataaaatatgattctcaatatccaaggacaattttacaatagctactttgcttatttctatatgaatctgcactggtcatctgagagggaaaagaaaaagcaatgaccatgaccgcctagcagaaaattgtagcaaaatgttgagtttgattgagaaggcttcttctttcttaagggagaaactgaacctgtaattatatcttcccttgggtcttcactttgaaggatgctaaaccaaatatgtctgtggaagcagatgatggctcctgggttagctgtttatttagcacattcctagaatatcagaggtcatatggattcattcagaaaccaaacatttcataagtgatttcagaaagcatagcctaaagattgagcctcaatgtaattggatagtcacataaatcatcccataatgcaaagcaggaaggagctggagcagttccccataatctagagtctccctatgagatgcattcctctctccagaggatcagcttatcctatttctgtggctcaaattttatgggactgatatcattgttgctttgtggtttggaaggttatagatgtttctcattttcccctttgataatgagccaagtcctgtgttacaaaaacttatttgaaaatgtttagtgaaggcaaagatacattgtgagttttagaaaagtctagttttgtgatttttgtaatggtccacagaaggcatttgtatgttttttcatttctttctttacattttttttttttgaggttggtcagagagaaaaatatgtgagttttgccaacagttgtctttgatcctcagagatgtgcttttccattgctagttcagttgaatttaggggataggaaaaatgtactttcatttttcatttctttgtaaatgttcttagaccataataaaaggctaaactgatattggatatgaattttcctttggcaatacaagataaaataaaaggcatagatacatttttatctttgcattttgtattgatgtaataataagcatcatgccaacacataaatatccttgtatggaaacacattctaatttaatcatttgtgctttgttgaaaatcacaagaggaaaccaaaacttagtattgatatttttcagtattactattattctagaaggagccatttatattgtcaagggaagaaatgtaaacatctatagagttcagtgatagttaagaggggtttttaatctttcaagaaatagatgcattaagttcagagaatagtaatttttctctctatgaaatttgaatctcataaaactaccatcaggttttaagattaaatatcctattgtttaatacgtgtagcaggggtcccttcaaatatgatgttttatttctctatttcaattttatgtattctttattagatatctgaattatttattggactttctctagagagtgcaacctgtctgtgcacagaactttcaagcttttaacataatatggatttttccctgtaatttcagtaaatttatccataattttcagaattgtgtacacccatttaactacctctccattcaagctatcgaatacttctgtccctccagaagggatcctcgtgttccttttattagtttcctcaacaacctctatgtcagcaaacacacacctggtttctaccaatatagaatagttttaactgtgcaaaaggcagctgtgaacaggaatacatagtatgtattcttttgtgtctggcttcttttttttttgagacggagtctctctgtcacccaggctggagtgcagtggcgcgatctcagctcactgctacctccgcctcccaggttcaagcgattctcttgcctcagcctgcccagtagctgggattacaggtgcgcgccaccatgcccggctaattttttgtatttttagtagagacaggttttcatcatgttgaccaggctggtcttgaactcctgacttcttgatctgcccaaattggcctcccaaagtgctgggattacaggcgtgagccaccgcacccggcttggcttctttcatttggcataatgtgtctggaaatttttcatgttgctgtattcatgtgtttttttctttctattgctgactagccttccattgcatcgatatatcataatttgattatctgttcacctgttgttagatagttgagcttttttttcccagtttttagctattacaaaaaaagctaccatgaacattgacttgcaggttttttgtggacgtattcattctcttgcgtaaaatacctaggagtagaacttctgggtctcatatggtaatgatatgtttaactttataagaaagtgccaaattgttttccaaagtggttatgccattttatattcccacctatatgattgacaattctgaaataggagttggggctccacaccagaccagatggaagactggctaaaacagggaagagacagaagcacctctgcataagacatgcccaacagcgccatgacagtgtgccattgccatgacaacacccagaagttaccatcctttttctagacatttccaaataactcaccccttaatttgcatgtgggtgtaaatatgactgcacaactgcgccaagctgctaccctcaacacgttgcctatggggtagccctgctctgcaggagcagtcacggagctggaacactgatacctcagtgaagctgattttttctaccaccagctcacccttgaattctttcctggccaaagcccaaaaccttcctgggtggagtcccaatatgggggcttgcctgccttgcagcagttcttttctccatctttcccaatccttaatattgccaatcttttcatttttagccactggcagttgcatagcagtatctgatggttttattttgcatttccctgatgactaatagtgctgagtccttttcacgtgctttttgacaattcatttattttcttttgtgaggtgttcattaaaaccatatggttcatttttgtttgtttcttattaatgagtcatatgttgtatattctgcatacaaatacgtcctttgccagataaatgtattgcaagtattttcttccagtgtgtggctaaacttttcttttccttatggtatcctttgaagaacagaagttcaatatatccttttatcccttttatggttagtgcattttgtatcttgtctgagaaatatttcactaccgaagttatcaggatctcccacgtgcatccttctagaagttgttttttttttgagacggagtctcactctgtcgcccaggctggagtccggtggtgcgatctcggctcactgcaagctccgactcccgggttcacgccattctcttgcctcagcctcccgagtagctgggactgcaggcgcccgccaccatgcccaggtaattttttgtatttttagtagagacgggtttcaccgtgttagccaagatggtctcgatatcctgaccttgtgatccgcccgcctcgtcttcccaaagtgctggaattacaggcgtgagccaccgcacccggctccttctagaagttttatagtttgagattttatacgtgttctatgatccattttgcatcaatttttctatatggtgtgagttatgtgtccaagtgtgtttagcaaatggtatttaattgttcaagcaccatttattgaaaagattctccttcacccccactcccactgaattgcttttgcatttttgttgaaaatcacctgcctgtgttcatgtgtaggtctgcttctggaatctctatttcatcacactgctgtacatatttacccctttaacaatagaacattatattacttaatgttacataatttcatattgtatattaaaatctggaagtataaaacctctagattggtacttatttttcaaaattgtttgggctatcctagattttttgtgtctccatattcattttagaatcagcttttcaatatataaaaaaacttgagaatttgattgagattgcattgaatttacagaccaatttggggataaaggtcatcttaaattcagccttccaatccatgaacatattttacctctccatttattcagatcttccttcatttccttcagcaataaagttttcagtgtagagtttgtgcatgtttctattaaacttgttatcaagtgtttcgtgtttttatgctattataaaatgacatgccatattatatatgctattttaaaattttactttctggttgtttggctgatatatgcaacataaatggatttttgtatacatatcttgtattctgcagtcttgtttaactcagttattagttctaatgacttaaataaatcctttagtatatactacatagatgacaataactgtgaataagttaaataagttttattttttcccttctctctctctgtccctctttctctgtgtatgtgtattgctgtgatggctagaactttctgtgcattcttgaacagaaagggtgaggttggaatgttggcctttttcttaatcttgacaggaaagcgtttagtcctttaccacttaagtatgatgttagctttggattttccatagatgccattcatcagtttgtggagttcccttctgggcatacttgctgagtttttatcctggataggtgttgaatttttctgcatcttttggtatctttcaaagcttttctttttttattctgtttaggtggtaaattatgttgatttagttttctactgtcaaaccaatcttgtgtaatacatcagaactccacctggttctgatctattataacttttacgtgtattcagaattgttatgctaaaattttcttatggatttttgcatcagtgtaagacatactgaactgtaatcttcctgaatttctttgtctggtttggtataggagtaatattggtcttgttagttagaaaatatcttctcctctattttctgagtttgtggaatataaacaatttcttaattgtttgatacaattccaccagtgaaattatttgagcctgtagttttctttgtaggaaggttttatattacaaatttaatttcttcaattaatagagactattaaagctttctatttcattttgagtcagttatgggaattttgaaagaattcatctattttatgtatgttgtcaaatatatttgcacagttttttgtaatggtgtctttctattattttaatgtctgaagattctatagtgacatcccctcttcattcctgaaaatggtaatttgtgttttttttcttttttctttgatcagttttggtagaattctatcaattttaataattttctcaaagaaccaatttttgacattgtttattttctctattgctattgcattttccatttaattgatttctgttcttatattatttcatttaattcttgccttagttagcttttctctagtttctttagataaaaattaactacagatagatagatatagatatagcctttaagcactacttcacttcacctccccagttttttttttttttttgagacggagtttcactctcgttgcccaggctggagtgcagtggtgcgatctcagctcactgcaacctccgcctcctggtttcaagtgattctcctgcctcagcctcccaagtagctgggattacaggcgctcgccaccatgcctggttaatttttgtatttttggtagagacggggtttcaccatattggtcaccctggtcttgaactcctgaccacgtaatctgcccaccttggcctcccaaagtgctaggattacaggagtgagccactgcgcccagccacctcccaaattttaatgttttattttcagtaacttccagttcaaaatattttccaattatcttgtgatttcttctttgttctatggattatttgcaaatgtattatttaactttcaaatatttgcaggttttctagatgtcttattgatttataatttcagttttattgtggttaaatgatatactttctaagttttcaattgtttaaaatttatggagaattgtgttacagccctgcatgtggtctatgctgctgaatgtttcatgtatgcttgaaaaactgtgttgtctgcagttattaagtgtagtgctctctgtcaattggctttaagtcggctgagtgttggtcagattttctatacccctattcatctttatctgtttcattttcggttactgagagaaaggtgttaaaatcttcaactctaatcatggttttatttttttctttaatttttgccttttcactttccttcgtgtattttgaaactattacttcatgcatgcacatttaggattattatgttttactgataaattgtcccctttgtcattatgaaatgtctttctataaatctaataatattatccttcttgaagtcacttttgtttgatattatttcagtgatttcagctttcttatatttactgttcatatggtatatcttttttcattcttttagttacaacttagtttcaccattatatataatggcatcattatatataatgtgcatgcatagtaaaaaacatataattgggtcctgctttttctgtgttttagttgaagtatttagaccatttacaactaatgtaattatttttatggttgaatttaacataccattatggtagttgttttccattcatctctttttgtgttgccattattctgtcttcattttggtttacagaatattattagtattccattctatttccttcattgtctttttaatgatacctttttttttgtatttttacattaggtctaaaaatatactccttaacttataagcaagttttcttagagttaatatgcagctgctttacatttcataccttccaattcatacctgacacttcatattacacaaattcccctttatacttcacaagtgaaatactgtcatactagtgtaattccatgtgcctatccttctgtgtgctgttttagttatatcttttacttctctctgtgttataaattcaccttactattatttttgctttaaatcactaattctctctctctctctctcttttttttttttttttttttttttttttgagactgagtctcagtctgttgcccaggctggagtgcagtggcaagctcccagctcactgcaacctccaccttccgggtttcagcaattctcgtgcctcagcctcccgagtagctgggactacaggcatgcaccagcacgcctggctaatttttgtattttttttagtagagacagggtttcaccatgttggccaggctggtctcggactcctgacctcaggtgatctgcccacctcggcctcccaaagtgctgggattgcaggcatgagccaccgcacccagcctacttctctctatattataaattcaccttactattatttttgctttaaatcactaattctcttttaaggagataatgaaaagaaagcctatcatttatatttatacaatgatttatcatttccagtgttcttcattccttcttggagatattttctgtttggtatcattttcctttggcccaatggatattattatttcatacagtacaagtcttccagtgacaaattatgtcagcttctgtttgtctaaaaatgttacactctcgttttttaaaaaagtagttttgctggatatttaaacctgttttccccatctcaacattttaaagatgtattccattttcttcttgcctccattgcttctgtttagaagccagctgtcatccttatcatgatgtccctgtatgtgatgtggcttcccccccgccccaactggcttctgtgttttccttgtttctgttttctaatagattcactctgacatgtccaagtgtagttttcttttatttctcctgtttagtattgactgaactcctatatcttactagacatttttcataaaatttaggagaattttagccgctatttccttctccttttttggcccatttttattaccttcttcttctggttctctaattgtatgtgtgttaacctatttgttgttttttctttgtttttttaaatatctgtccattttcctggagttcttttttctttgttctttagattaaattatgtctattaatacatattaaagtttactgacctttttttcttctgcctacagtttactgttaaacttgtcatgaagttttaatttgaattagtgtaattttaagttatataattttcatggttccttttaataattttctccctttttgggccaaaatttcatatctgtttactttttaaggctttttctttaagtctttgcacatatttttaatggctgctttaaagtctttctcttttaaatctaacacctggatcatctttgaatcacaagatgacattttttttctcaactatgaccacatttttcttgactactgatgacatttcttttcttgatttgattcatattttctcattttttgttttgtttttttaagacggactctcactctgtcgccaggctggagtgcagtggcatgatctcggctcaccgcaagctccacctcccaggttcaagcgatcctcctgccttagcctcctgagtagctgggactacaggcgcccaccaccacacccagctaattttttgtatttttagtagagatggtgtttcaccatgttggccaggatggtcttgatctcttgacctcatgatccacctgccttgacctcctaaagtgctgggattacaggtgtgagccactgcacctggcccatattttctctctttttttttaatatttgtaatagttttgggttttatagtggacatgatagattgggacatgatatgggggtcccatatcatgtgggtaaattatgtgttgtagacactctgtattatcttatcttcctctgaagctagtttgatatctagctgattactttgtatctgcataggtttatatctgtacttgctaaagaatatttgtgaacatccctgtttctcgagcccctctaacttgctaggtctctacctccaacttctatgattcctgcaggtcttgttaagacttatcctttggcccggaagttctagagagccctactcttggccatggtcttcacttgtaagatatggccttttaggtgtctcatttgaatgcctgaggtgttaaggaggtatccccattctggaatgggagagaactctaaatgatcttgtttccgcttccagcctagtagcagctcctgtctgacatgctttctgaagtctcaccttatgtattctcagcccaggcttagctaagaatccatgggaagccctactcagatgcccggctttcctctctatatacttcttcttctctgtagaatttccatatagttccagctgctttggcaactctaatctttgcatcatcagctcagtaggactgtcattcactacttggacttcagctcccttctgtggtcaggaaattctgcacaggtagaaagccaaggaaatcaagagtcgtacatcatgagtttcctttctgtcaagaatcacaatcttgtactgcagattgtccaatattttgttcagttttacagttcttaaggagagcagctagtttagtacagttgcttgtcatagctggaattaaaaaaatattaaagaacctcagccaaccaggatagagtacaggaagaagagagagagaggaaaaatgaggtgagaaaaatagaagtcgtaggattggagtttaggggtagtttgaaagagaagaactgaatggagtagggagagtgggaggaacttagatgcatgtaccagtccccttcgtttccaacacatcatgtaataatatttcaacaactacttactgggacctcatctgggccaggtactacagtgatagtaaataatggttaataaagtcttagtcatatcccaaggtttagtaaggtaaatatactcacataaaaacaattacaaaatatgtttggggttcaaattgctatttgcataaaattttattatgctaaataaattaattctgcttggttgggaaaggtttcagccaaccttaaatgatgggtaagagtgtatatgttaaactgtgtattggcaggggttgttgggtggcgggttaggtaaagggtaaagcatttcagacaaagtgaatggtgtaaatatcattggaacacatcaagaactgtagtttacttttgtgccagcaacagaaaagaagcttggtgagtaaatcaaaatttcagtacagattaacagactcccaccagttgttccagaataatcacattcatgtaagcaagataaagggaaactacccatcattattgccccaaaatgtcattaattcaggttcctccacctgagacctaatcacacttaacattctcccacagacaagttgcattagagatatgcaagacaattgtatttcccctccaggagtacagtgagtaagcaagaacaagtgacgacagataatttcctctaaatatttgatttactggccaaagctctctgtgtgtgggtcaatgagtctgtctgttctgtcaactcagggatactgggtcattgctttcatttgatgtcctttttttagcttagtaagtttcattactgggtctgaaatattaatagaccaatgctatactcctccccgctctctttatccctcttttctgcctttcctgttgtctcccttctgtctgtcttattcccttcctctctaccttcctttccacttgtggaaatattttggcagactacagagaagcatacttttctatacttttggagttaaacataatctttggtgttaaatgtcactgtgaattccttcaataaagtaaagccttgattgcttgctgtttaaaatagagtaaaatcaaatatctggcgaatgcccattcctttgagagctacacacagatagtagaacctataatatgttctatgcatctctatgttttcaataccaatgattcttcttttctgagcttggggattatatagcagcaactagggaaacagcataactaaacatccttattattattattattattttgactcacaatgaaacacaatagtttattgtatccaaaacctttcagtaggagacctctgtctactcctataccctagatttaggttatggctggatgcaattggaaatacattaaaaatgcatttatttgctgggcatggtggtgcatgcttgtagtcccagctgctggggaggctgagacaggagaattgcttgaactcggggggcagaggttgcagtgagccaagatcccgccactccactccagccttggcaacagagcaagaccctgtctcaaaagcaaaaacaaaaacaaaagcattcaaaccagattttctttgtaaaatatttcagatttggagggcataggagattgagtgggtggtaataaacacagaatcgactgaataggtaacgttaaaactgttaaactagaaaagtttttaaagaagatatttatttaggacttcaaaattgtccaggtactatgctaaatgttttataaatgacctaatgtcttccttataaagtaaatgaccaccatttactgagtgcatatcatgggctaagcccttgtaatgcattatctttaactcttaaaccttcagtcaaaggtagcaatcctcttcatttgcgagatgtgagaactaaggcttagagaagtacagtaactctcccaaggctgcagagcttgacagtgtttgagagggttttcattcgagatcactctgatccttgagcctgggcccttattcttcaccccgtggtggaggtacctgctttgtcatttctcataaatgcatgctttggtgaaaaccactttaaagggagcttatgaaaaggcaagactgaattatttctaggccctcctgcagtggatcctaatttttaatgtttatggtaatttgcaaggattagaaaaacgtaacactttcaagacttaaagggttgtttactcaagatatatataacaatttcctctccatagcttagatttagtgttggtaattattttgtctttaagattacaaaaactttgtttcagaatgaagtctttatttgcacattccagaatggcttattgaaaatcaagtataggcacaaattaatgaaatacatattactggatgtattataaacatatcaatattttctattttctctcttatggtctgtttctgttcacagcatgtttgcaagactacacagatgatttggggacattcacttctccaaacttccccaataattatcccaacaactgggaatgcatttatcggatcacagtgagaactggccaactgattgcagtgcacttcacaaacttctccttggaggaagccattggaaactattatacagattttctggaaatcaggtcagcacttttatttatttcattataatcttttcattatttattctcattaataatctttcctaggaagattaaggaaaaaaatatggaaattctctgcaaagctccctgctgtgcactttcttgcaagaaataaagtttgtcatttggagcctgacttaggagaaatacaggaattgcataagattctgtggttattttgaagtgattattttattggaaatacttgaaaataaactccagattttatgtgggcaaagaaacagatgtgctactactctgaaatgatgtaacttgctactgttgaatacctactttaattatgtaaaatcgatgtaaattttaggctgtttgctgttcatttaatctaattatattataaaatgatggcaggatagcaatcttaaagttttcacaaagttttcatgttcaggtaataaaagtctaggcttgtgaatttcagtacaaggcattattctttcattatcatcattttgaaagaatgtgtttaaaaagttatatttgcagtaaaagtaagttagcttatatgttactatctctccatgccactactttgagttaaattaggctaatcattctggtgggcatctatatcaaatgttttatttgggattttaaatctggaatcttatgtattataaatgttattctataatataaagtaaggtattaaaataataaatcataattggaccctatcgtgctaaaatgacataattttcttaatttacagcagttactcactggactttgatgttgaataaatcccttttttgttgtttgtttcaaaaagctacagattataaactagaattaaggccccagaagtttttaggaaaatgctatttccagaattttgctaagtatatcaaatatgatatattacatttcaaaaatttccaaatcagaaggaaaacgttgaaagattctctgtaaaatacagcagtatgtttatatagttaatagtatagtttctttatcgtgttttctctgacacatttgccagaggctttattcgaaagggtgaagattaaacatattctctcagtttgtgattggttatataaaacaccataccagctatgaatgatggttattctttgttaagtcattcaaatatgatttttaaaaatttaaaagtgaaaatcgtgttttttagagtaagtgtagtgtttgagagaaattacttcatccaataaactgctaatgtttgcaatcccaaagttcaaattatgttaaatgtttatacagtaatattgtcagtaacccaataaattttaatttctgtattctgccagagatggaggctatgaaaaatcaccattgctgggaatattctatggctcaaatctacccccaacaatcatctctcatagtaacaaactatggttaaaatttaagagtgaccaaatagacacaaggtctggattctcagcttactgggatgggtcatcaacaggtaaatagcaaagagctgtcttttactggagaagccaatctgattggtttcttgattctgggattgtcatgctctgtccctcacttgtccatgtttgcccagctgtatttaaacttcaatattgcaaataattttaaattaacagcagccatttctttttaacagacaaagggagaaagttctagtttctttttatcaataaataagaatcctggttagaataaggaaattgcattaatggaaattggggctgggtgctgtggctcactcctgtactcacaaacactttgggaggccgaggcagggggatcacctgaggtcaggagtttgaaaccagcctggccaacatagtctctactaaacatagtctctactggccaaccccgtctctactaaaaatacaaaaattagctggacgtggtggcaggtgcctataatctcagctactagggaggctgaggcaggagaatcgcttgaacctaggaggtggaaattgcagtgagtcaagatcatgccgttgcattccagcctgagtgacccagtgagactccatctcaaaaaaaaaaaaaaaaatagaaaaaaataaaaattggatttttaggctataactactctttcatgatgccattttgctgtgcaatttgatttaaaggatagtagaatggcaccagtttaatgcagacaaaaagattcaatttccccagaaggaaaggggtgtgtgtcattccacttctttctcctgtaggttgcgggggtaatctcaccacttcaagcggcacgttcatatctcccaactacccgatgccctattaccacagctctgaatgctactggtggttgaaatctagccacggcagcgcatttgaactggaattcaaagactttcacttggagcatcatccaaactgcactttagattacctggctgtatgtataatgtttccatcatattgttccctgctcccatctcacccaacgcacaatgcacttatttttattttcgagattcaggaaaggggagcatctaaaccgaacatccatataaaaattcaaacaaaataaaaacataaaagaaatttggtgaaagtgaccatcttcgaagtactcaatggctcgatacactaagtatttaaaatatattgatagactattaagatatggtgaaaatctcctgaaagggattacaggatttattataatcattatttatgtttttccacatatgcattgaaaaatcacaatttagaagacagttttggcgaagtagagaagataatatgagtcattccactaggatttttcacagtacagcaattcaccattgttcatttgttaaaaatctaaataaaaatgtattgaagtgtcatgaatcataaactatggaatcaaaaaacaaggaggacagttgacatcagctgtggcattacaatatgtattgggctttcattttcaatattcagccttcagtgtaagctcacacgcttattactgctgcacatgtccacagcttaattgcctgagtttatggcctgagtttataaatacctaaatataatttataaggttattttatttcatggctattcttttgtgatgtcatatatataacaaaaaatatatatttattatatataaagatatatttattttatatatatttatgtttacatataaatatttaatacatatataaatatatgtatttaatgcaaatataaacatatgtgttgaatacatatataaaaatatatgtattaaataaatttattttataaatatattatatataatgaatatttataatattttatatataattacatatatttatttataatatatatacataataaatatatatattttttcttcctcacttcttctggattatagtcctttacataatgtttatagtctcaaccatctaacattcaaaatattttcttaaaggtatatgatggcccaagtagcaactctcatctgctaactcagctttgtggggatgagaaaccccctcttattcgttctagtggagacagcatgtttataaaactgaggacagatgaaggtcagcaaggacgtggcttcaaggctgaataccggcagagtaagtgtgaataccggcagagtaagtgtgtatactggcagagtaagtgtgaataccagcagagtaagtgtgaatactggcagagtaagtatgtatactcgctgttcagtgcctagagtgggccttcaaattcttgaaacaaactgaaataagtgtaacgcattggtgtgagcaattgaacttcatcttagtttcttctgtgaatcgtttaactccatttgagggagaaatacgtattaaatttaatctcatataactaaaacatctggcaaactatagaaacttagaagagtatttaatatgctgagagagttgcaattcagtgaaagatcagtgtaccagactaatgactaatagcttttcatttgcctcacacattgcaatcttgcagtgtacattatattattccaatgtacatagtattctatcacactagtctctaccttaaaaagtaccttaattttattagggaaagctgtggtccatgtgagtcatgcatggaataagcatgttctttacagtagaaaaatctggccattgtacagatgccattttaaatctacttttcccagatagcaacatgatggaattaaaggaacactgagcaaaatgtcaaggggcctggggtttgttctggctcctaacccttgagaaagtcacttttctttgtggtcccatggtttcttcttttagaaaaggagattaaattagatggtctctaaacctgccttctagctctagaattaaatgctttttgaagttagttccaaaatggacattcaagaaaacaatattttcttgaatttgttatttgatagagacttttactttatcaaagtaaagtctaggttttggaaacataattctactgaatcaaaatttatccataattttacacaattatcttttcccacagaatcaaaatttatccataattttatgtaattatctgaaagtggaattaaaagtcacaaaattattaactgtatacacaatatcccttgaattaactgaaagagtaataacatttaaccttgattatgtatgaattttaagattcacattgatttatatctggggattaggctgaatcctagatagttttgaatattaagttttaatatatagctttgttcttcagaaatgtatcactagtacataaaaaggtctcctaagttctatcagagatacatctgtttgactatgtaatcatttatctaattttattactgctgtgctaatctatttctggttataatcagattgtttaagggtttcttttttttcttttcatttctgagatatttttctgtcataatttcagaatcctgaaagtgtaaatgagtgcacataagaggcaaaatcagagcaaactagtgagattatctgtaaaatttgccatgggaaattggagatttacaaatagtgtaaggtctgagtgctgagagtggcccatgtggtttactggaatgtattttcctgggccctgtgttgcccctagtcatcgaggcacgtgatgcctatctgcctaataggtgtaccttctcacagtcttctaaaacaataagattattctttaaaaatcctttatggacaaaactgtgacctaaagattttcaaacagaatgggtttaagtattctccctgctccaacaaagcaatattttgaagagccacaaatgtacacttttttaaaccaaagttataaatggtgttctacccaccttcagaaagcatatcgtagtaggaatacatctatgaatcacactttcagagacagctcattccatataatgtttatttcccgttctcttttattgcacatcatagagataatatattccttgtttaagtcattaggattggctgaactgggcacccaggattagacatacttagaggtatctggtttggttttgttgaaaactcagctcaagaaaatgccaccattggattgaagactttttttctgtaatttcacattttcctttcttctttaaatcctttctactctatctattcgcttggtacttcctgatgactaactagagggagaacggagcctttattgtgaatttcatgcagacttttgaatgttcaacaaagccatgttgttactggtttttagcattcccataggattttgggtttttaaactgttgaatttaaaagtcagaatttctgtcccttccacgtgttaacattaaaaaaacagcagcacagaacgtcgaatgcgcttctctaacaaacaaatcagactgatccctgaatataaccaagttattctgctctccacaaattcaagggaatttgatgcctattttaacatgactatttaattttcatgactctttagtttgaattcacttcagtattatttcacatttcttctaaatggaaatcctttcactatgaaaatactgcaccaaatatatatgtgtgtgtgtctctgtgtgtgtatatatacacacacatatatacacatcatatatgtgtgtgtgtacatacacagatgatttttatttattttttttaaaggaaaatctcatcttggagcacttatgaagtatataatagtggttcttaacagtcatttctttttccagcatgtgagaatgtggtaatagtcaatcaaacctatggcatcttagagagtatagggtatccgaatccttattctgaaaatcagcattgcaactggaccatccgggcaacaacaggcaacactgtgaactacacatttttagcatttgacttggaacatcacataaactgctccacagattatttagaggtatgtattataaagcttgattgatcactgctttttcagatcaagggagatgtgtcaagttagaatccatcatgctttttagaataaaatccctaactctgccccacgcatctataacacaccaaccacccatggtatttgaacaggtatatttcatatttaatgtattaaattgtgaatacagagaactatctatgtttttaggtttcagtgtaacttctggactcattgacctcatattacttaacttacatggaaggagagtaataacctctattttttgttggttgtttttatgtttgttctctgtgtataagagatcagaaaatgtttgggtatcttggatttatttaagatgtcatttttctagtatgaggtatcatggttttaattgttgtttttatttttaaatgtaagttcatttcagtatatttttatttttgtaaaattgaagtttcaattgttataatcatgaccactagtaacatttattcaactgtctgtatgcaatttcaggcaataaatcttgcttaaatattaggcaaccttgaatataaggtaatatgttatttttgcaataagaaattttaacttaaaaagctttttgataacttgcatatgtaacttttagggctacaaattgggaggttattttggcatctacgtttcatcatcagtaaaataactttttgagtcatctaaggcattatctttatttctgtctatattgttaatatataatacttcaaaaaatccacatataatgttttcactagataccctttctgaagtgataagtacttgctctgataacaggacattttttttcccacctgccctcctacctgcagcctagtgacttaaggtagttgtttttaaggtggtcagtgatttttagaagtcttacttacaaagacttcaacatccattgctggcaactctggggtcatattcccaggaaaaaatatgttattcttgtaaaatgttcttaattgtgtttttacaagttgtataggaaaactagcattggttgaggttggttgaggttaacatatattttccaaatagcacttttgtttatgaaaacaaagagtgacaacaaagcattctgcactttgagagactctgtgaggtcctaactataaggagattcccttgtttttcagagataattttttgggaaaaaattttgccttatatttacaaaagtacaatattacagaaatattagccatagtgtttacccattagaaagttttgtttaccagtattctaagaaaatatgacacaacatgaaacaaacttacaagcacgtacttggcaatggttttaaagtccaccttccttgacctggagttcaactggtcttcacaagcttaatgataccaggatggtatcattaagatactactagaataggcatccatttcttcacatggtgagaccttgtttgtgttttagaaaaagcagaaaagttgctttcaaagccctttgtttataccgtgaacacagcagttggtcatacctccttttaccagttaggactattctgattcccactggactgtgggcttctcgaaggtctgtgctgtctcctactaactttgtaacccaggcacttattatacaggtgggacattacaggagttcagtaagttcaagttgaattgaatatcacagccatattttagtatcagtctaatgataactactaatgaatgagaaagattgaattccaaactggcgtttttgtacgacctcctacacacgcagtgcaatcctacaaattggagcacaaaccaaaataggactcatgatcttgccgagcgttgcacgtataacagtgtgctgggcaccataatcgtgatttggtaaagcgtaatggagaaagccacagaaaggaggatgcttttgaattgggctttaaaggaggctttggcagaaagaggggggaggaaagagatgaaacatttccaggacctgaactccatttctttcgactcatttgaggatgaaatggcaacaaaaaggtgtttaaaaactcaaattaaaaaatgcttgttccagcaactgcagagtagctcattagagccccttatggatgacgtgtctgtcatgttatggtcatgccatttctcttgtgcaacattgacggtgaaagagcaaaaatacaaaatgagaaccagaagttcagaaaggccttccaaaaaaacggcgctgttgccagagggaggagattgttttccatctctgtgagccaagaggccagaccagagcaatagctgcaatagctggtctatgatggaaattttaacacacaaacaaccatttacagagagaaaactcacacacacagaaatctagcttccattattttaatcgcttctgggttttttcagctgacttccccaaatcccaactggatgcctgttactagagccagaatttagttattctgaattaataaaatggaaactacaaaaagacttaattacgtgctggtcagacactatcccgccttgatgagaggaatgggtttgaaaagatcccattggaaaccaaatgcatcctttattatttcaccctctgggcaaaacaaaatatttcagatctggaaataaaatatacagtgggagaagggaccatttgcttaaaggagtgagaccatttgcccgtgcaaacatggggaatcaacctgaagagttctggctgtattttacaacttgatttcagtcttccatttttattttgagtctgagtctccatgcagaaaaggagatttcaaacgagtgattgaatatagaaatggaaatgatagatttgggagaaatcaacatggagatgtataggaagcccagggtatttgttaagtcaacagggagcatgtgtgtagtgagaagaggaagtaggaacactaagaggtgattgtggctgggcacggtggctcaggcctataatctcagctactcaggaggctgaggcaggagaatcactagaacccgggaggcggagtttgcagtgagctgggatcgcaccattgcattccagcctgggtgacgaagtgagaccctgtctaaaaaaaaaaaaaaaggtgactgtgtcatgggagccaagggaagagcagtcgagagaggttgtggttcagaagggtcccttggagatcaatgtgactctggtcagagcagtgtttgtggggcgagagcaggaaccagacagtgtaaagaggtacaaagaggagagtgagtgtagactgaagtctaggtccctgaattctgaggctctctgtaacaaaccagagtaagtgatggcttcttttctccaatccttatccttcatttccctaactggtcctcatctagttcacgtgtgtgggacacactcctttgcatgttctcttgtatgtcagtgcctctttaaatgtggccccagaattggatgcaacagttcaactaaacctggctaggcccaagtaggttggaaccgtattatccagttcatatatttctggtggtctatgctgaagttaaatggggtttattgtagctaagtcatgatattggcctatatcaagatttataatctccatatcacttttacatgaattattatgaatttatgattatatgatttttaagaatctaaacagagatatttttcctaataaatcagatttgattttgtctgagaatcccaacacatcatgacctccctaaatcttcattcattgcttttcagagcattattcatttgcatacagactcattggccactgacctagtacttcttcaaaaataattgataaaaatgtcaaacaagattgcatctatttcaaatactcttaaatgataagttcttttggttaaaattgatctattattaagtgcttttggaatagcactattcaaactactaggtaataaaagctaatatttattcagcatgtattatttgccaggtaattctcacagcaaccctgtattataagaaatattatccccattcgttaggtgagaaaagtgaggcagatataggttgttcatattcagaaagattataagtgtcaaggccggctttctagcaggcactgtaactccacaccgatgctctcagccataacaccacataccccgggagcactctcacagtgtcctgtcaccctcacagggatcatggggaagtgttcctgctgcccccaagtctaccattctattgacactgccgcaaagagaaatcaatgttttgcatgactccatagataagcaggtgccatttattataatcacctctttctttgcttcatgttgacaaattatttttagtgtctaatttagaatttttccaaaaattactgttaatcttactgatctacgagattctagaatgaatctttccccatcttggaagctggaacgttttcccttcagccccctggcagccctgctggttctccttgtctgggctcgcactcttggtggtggcaccgaaacacaatctgagccacatgaagaggacaggcgcatgtgacaggctggttactttgagaaggctcacacctccccacacacaggagaggctgagaagcctggagaaggtgggaagccaagagagtgaggcagattctccactcccacttcctaaggctctgctcctgctccctgactgttcccatccattcccatccctctccccaaaggcttcctctgagtttcagcaacctcggaattttagcttcaacaacatgaccaccccagccttgaccctacaggatcatttacctcaagtgcttgcatacaaccagactttcccttggtgacaaatccccagcacagggagctcatgtgtttgagctcgacagcaaatgcatgggtctagcctgcctatggacgatactcattagggcagtgtagccaagccctctagccggtgatgttcacagattatgttctgggcagaagcagaacttgtgagcaggggcatagattccgctggaatgctaaaactttttttttttaatttaactttcaagttcagggtatgtgcactaccctgatagtagtacacataccctgaacttatttattatgtaggtaaacttgtgtcatgggtgtttgttgcacagatcatttcatcacctaggtattaagcctagttctcattatttttttggatcctctccctcctcccaccctccaccctcaggtaggccccagtgcctgctgtttccctgtcctgtgtccatgtgttctcagcacttagctcccacatataagtgagaacatgcagtacttggttttctgtttcctgcattagtttgctgaggaaaatggcctccagctccattcacattcttgcaaaggacctgatcttgctcttttttatggctgcgttgaaaacattaaccatgaactatgcacccatgaattcaccaagattacaaaatcagctctgtaatcactatacctttcagtgctgtggcatataattcccttaagcctggaaaagttcattgaaaagagttgactcttttatcttctaaactggaattccatgtctcttcttccagtttcaaaatcaaactaggcatgtttctacctcctcttcattgacatcacactctcttctgaaagcatccatgccatccgtgtttccctctttcatttgccctagtcacagccttaaaattagacattttttctaatgttcaacaatatttttctgtgccatttcccaaagtttagctagttcgtatgtgtacccataaaatggtcagaaagttccatggagcctcttggatttctgcttagattgatttctttagagggttctccttttttgcaccccccaaaattattcctgattttgtagtgagaatttagtttttcagaatttgccaattttctagaatgttctttcctttttcaattgcgttttcatttgtttattttttttttttatccataggtttatatcttgttttgaagtttgaatccccaaaaccttagtccggttaagtggtcagccatcacaggctctaagttaaggcaaggtgatcactgtctcctattgtcttggtgacttccatattaacaaccacttctttgctagccagaattagtccagagttgcacttctcttcactgtctcctttatatgaagagagcatataaagaattcaacaaatgctacattttttgggggaacaagacatctcataggtgtccagattgttgaaacagtctccccgtcgccactcctgtagatctcttttggtacattagtgtttatagatttcctttacaaaagattgcagtctctactgaaaagaagctgaggtgggaggataaagtccttataactggctaccaaatctggctgcattccagaatcatctggggatcttgttagaaaaatttattcctagtcctcatcccagacttaaccaaatccttgaggattccccaagagcaagctttgcacaagcccctggtccagcacttgagaccactgttcatagcccacttccaccaagatagcctgttttatcctcacttcaatgctctctcctggggagggaaaagtatcttaataggcatcttgttaacatacatttgcctgctattaaatgttactttccagtgaggacttactcttccattgctatggctgagttatgtattttatctcaccaaggcctggtcatacagttgatattatgtttacctcattatattaaaaatgtcagattcactttacagtttttgtattctgattctaaactttctcccccttttccttatcgggcaccttgaccactatcatcttccattaaatcatttccttattccttccccttttccactaaagtccatttcaagtcctcgtgatagtgtgggggacttcagtcaaaggcatttccctccagtctttataacatgcatttcatctcttgccaaatccttgctgatgtcatcctgttcaccccagatgcttatatcacagtttgttgcactcccgtatcctcctttcagttgcaaaataatgcattccaagaggaagaatggataaaaaacatcaccagtatccctgaatcttgcagtgtcacatccatattctccatgtctacagcctaaacaacattttccatataccacgactgagaaacatcgggctcatgggatattgtcaatacttaaagtgatgctagctgttatggagaactcatacattctcagttgcttactgcaacacaggttatttctaatcacatcagagtaaaaggcaggtgttcctggcttccatgtggtagttcatgaaaccaaaggaaggggaagtcaatttgcagaagccacataactgtctctgccacaaatgttggtagatgtttcacaaatagagacctatattctaataaatctgcgatatgccaaattaaaacacaattaagcagggtttgttgttttgttttgcgtttgctgtggtatttcctcaggctgtcactatcctaaatatgcattcttcattcctttatccatgtatccagtcagtaggatatattttagacacttaggctatggacatgtgactgttttagcatcagttttccttgtcatgatggaggaaacacaccttaatcaatttatcacacaataaaaatttaaccacaggcagcgttaagtgctgggagggacaattatagtgcacccagaaggcatgagatgggaactgagctcctttgtgggtcaggaaaggcctccctgaggatgaataacacaccaggtgccaggaggcttgagatgtgagggactggaaggagagcagtgtgaggctctcaggtggacagggacctggcctgcagagcagggtgggcacattaagagtttcagagacctcctggagagcagcaggaggtctttcaaggatgtggtcagatctgcacttttaaaacaatcactctggctaccagaataaactggagggaggtaagagtaacggtggagacccagtaaggggattgctataggccaagggagagagaactccaggtcttcaccattgctggggaggaagcatgagatcgaatgatttcagagcacttaggaggtacaattgacagagatggataacaacaggatgaaggaaagggagacatcagaatatagcctgatagatagaactggacgcagggaaaaccaccaggggagattagtcccaaagagattatccttgcccagaagtctgattaatgaacatctattggacatttgtattccatagaacattctgaggaaaacattattctagagatattttccaagtttatttcattttcccctcatacaaacaagcaaactttgaagttcatgaggcattagagagttattcgcatctcagatgttattttgagaattacagtaatatttgtcattaatggaatgcccatcatgtgctagacactactaccaatactttgatagatataattgtctgtcctcatagtagtccagtaactgagtataagtatgctcacaggagaacagggattgagatggggaaccatactcagtgcaggaagtgtcatcactacatgaagtgatgaaactacgttcacactcagtgctgcacgaatacagtgtgggctctggagtccacctggctccaaagctctttaccagctgtgatcttgggcaaggaatttaacgtctggctgctttggttctctcgtgtgtaaaatgaagataataatccacacacctggaaaatattgagtcctcaggaaatgcttattactcccctccacgccccttctggagagagcccagctcctgcctggtcattcagcttcttcctgggacacttcaggaaatggtttctcacccttacaccagctgacctccatctcttgcaaatgccatctccattccttgtgccctgccagttaggagcagtggctcctccctggcgaggtctatcttcctctccaggcagagttcacattttgttttctttctcttccgagttccctaactcgatccatggacttctccataagggctttgctttctctctgtgctctccgaatctgtttaaaggcaaatttcttctgtccttggaaagaccttgcatccgctctaataagtgaagcgtaaatcagtgtttgtgtttgcagtgcacgtcactgctggtcacatgatggcataacagattccaaacaggtgccaaggatgattcttcaatttccaaattgcttggtttaaaggtaaacgccagtctttagctccctattgaaaacagctccaggcactgtgctttctattgttctagaggggagtcactggaattagaactgcctcagccagcactcttctatctggtgactaccatgggatgctaatgacaaagatgtagtaagtcctctagcactcgttcgcaagagaatgtcttctaggcacccagacatatgatagaatgtgctgaattggtagtctctgtacctgcttcagagtgaagcaggtaacttcagaatgaagtttaaacccaaactccactacttagtagctaggtgaccttgggcaagttccttagtgtctatgtgcctcactttccctttctgtaaaacggagtaataagagtcaatgaatccatatatgtaaagagccaaaacaaggtctggcaaatagagaacaaatctataaatgttcactgttattatttgcactgatgctgatgtaagagaaacatctcagtaaggtatagagaaattcacaaatagagagccttcaattctttaggttgagatataattaatgattcatttctcaagacatttaattttcctcttgttttctgcctgcagcctgcatggttaatgcattttgacacttctcactaaggataaatgacaaatgataaaaccaacaatttttgtccacttattttactcaaagctccgttaagaaaaataatgaaaaaaattttaatttcagtgactaacaggagtgttcgtattgtccctatcattttaaaaattgttttggttactctctattattacagagaataaagactttctgtatcctggagtttaacaactcttattttattttattttatttttgagacagagtcttactctgtcgcccgggctggagtgcagtggcgtaatcttggctcactgcaacctgtgcctcccgggttccaatgattctcctgcctcagcctcccgagtagctggggccacaggcacccaccaccacacctggctaatttttgtatttttagtagaaatggggtttcaccatgttggtcaggctggtctcgaactgccgacctcaggtgatccacacacctcggcttcccaaagtgcagggattacaggcatgagccaccacgcccgaccaacaatgcttattcttaagaaaagaactgccacagaaggaaataggaaaaattcttcttcagtagttgatgcctttcaaaatattaaattactaaacctctacctacctcagtttccagaactctaaaatgaagataacaatactacctgcattacagagctgctaggatttttaaattagaataatgaccagcatggaataagtgctaatacatattatctatggttattttaacataaacatagtctcatggattatttttttgtgctctgaagcaggagaccccaatctttttggcaccagggactgtttttgtggaagacagtttttccacggaccgggggtggggtgggagggtggtttcaggatgattcaagtgcattgtatttattgtgcattttatttccattagtcttacattgtaatatatagtgaaataattatacaagtcaccatcatgtagaatcagtgggagccctgagcttggtttcctgcattagacagtaccactggggggtgatgggaaacaatgacagattatcaggcattcgattctcataaggagcacgcaacctagatccctcgcgtgtgcagttcacaatagggttcatgctcctatgagagtttgatgccaccagtactggtctggggactggggctcttgctctatagcattttgtggtaaataaatctgtggtttccagagcagccttcccagttgtaattaacatcaattggccccactgtgttgaaagcagtgctgcttctcctgcctcccagttttcctacaaaagccactgggattgtagataaaatcctgttttccagttggcgagatgcagagaagcagatgagattttgtctgagcagcggtggatctgagccgactttgattatggctccaccgccaacgcttcctgggcagatgagtcatgcttcctggaactgtctgtcagaggaagtttgcttctgggacttttgcattttgcttagagcttagagataagctattacaattctaagttcagctgctattcaaaaacatgcataaaagctgggaagagtttaccaaacatttcaatttataacttgataccagatatgagtctagcaccgtactaagcatgatacctggattcaaaaaaagtttagaatgaagtatatccattagttagcgaagccagatgctttgtagtgtcgttgagtttagcatgaggcattttagaagaaattttggttttaagattgcctgagtaaaatgtgattttttagttataaaaaattgaaagaagaaatgttatttcagtgtgatcagaatccctttccttaaaaagaaatgctgatcttttctgaccatctttcacaatgaaggattttcgtatgattgcattaatttgcagcagttaatgaaccaacgttccaaccttcaaaagagcctctgctctcagattcaaaagaaactctgcgtgtttcctctcttcaaacatgaaggacagaattaggatgaataataatcaaacctaaaataatttctgaactaccctgaagcagtaaaaattccattagatgctcagaacttgaattgtcctatgcacactgcctttcctggttgacctcaggttgctctgctcctcagactggcgaaaggcagggcaaccgaaaggtctcttccactatcagacaggctcatggtatgaataagcatgcattgagcaaaatgctaaattttaaacactggtaatcacagttgtgggtttcagttaactatattgactttctactttttaaaatgggaaagatttccaattgcaacattacagaattttgtttaaacacgtctttaccctgcagttcctacattggctctttatttatttatttattattttttctttctttctttctttttttttttgagacagagtctcactctgttgcccaggcttgagtgcagtgttgcattctcagttcactgcaacctccgcctcccagattcaagtcattctcctccctcagcctcctgagtagctgggattacatgcgcccaccaccacgcctggcgaatttttgtatttttagtagagacagggtttcgccttgatggccagtgtggtctcgggctcctggcctcacgtgatccacccacttcggcctcccaaagtgctgggattacaggcgtgaaccatcgcacccggcaggctctttatttaatagactttcttttcctgatctcactgtcttcagggagagcccggatggcagtcctctggcttcttccagctcaaaggtctatgatttcacgttgttctatgaaccaggttcttctctgttcctgagaccatctgcagcaggtggtgagaattttaagaggcataataataataataataataataataataataataaatgtttagtgttttactgtagcaggataattggcagagggaaggctgaggtttatggaattaaattttcatgtatacacaggagagtatgcttagctttcaaagcatttcacttaccactagggagggatttaggagcccttgctccatcagtgactatcgaaacatatgtttacatgaaaccgtcagtccctgaacatctgaagacattattatttttaaaatttttaatttttgtgggtaattaataggtgtatatattatggggtacatggtgtgttttgatacaggcgtgcaatgtgtgatagtcacatcatgggaataaagaaataattttttgtaaataattagcctaattaataataaaaatctagttatgataaaaggaagcattataggcaaaatatgattttaaattaatgctggagcagattaccttacatggtaacatttcagtggattaatttttacatataaccttgagatacttaagaaaagattatggagatagacaatttaatatttttagtaggccaggtgtttatttgacagtctaaaagggtatgaaattctgagattggagaagcattactaatgcatatctctactgccatgtcaataggtccccaaagatattgctttaaaaataaatttatcagatcacaaaggaatttatagtcattataggaaattgggaaaatgtagaaaaagctagattaaaaaatcctaaagtatatcattattactaatatttggtggtattgatttcctgtcatcgctccttgtatatttattttattttaatattcgaaggagattattcagtacatactaacccataatgacttttttcacctaacaatagcttgtgactatttccccatgttatttattatgtcattttcaacattgctcatcccatcatcacaatacagccaccaattcctgttgtgaaacacttagaatcttttcaaatcttcaccattagaaacagttctgagataagtatctttgtagttaaatgttttcccacacccatgattggacaatgatttaaaaaataaaaagactcaaattgtggcttctaataggagtaatatatagaaagcagaataaaaatgtaaattctagtaagagcagacagcaactagccaccacatagaaaggaaacgctggtttttatatgagacagacctgtaactcagggtgacaccaagtaactcaaaatgtggtatttcgatgggttttttgctctcatgcaaagcccaacattatgagtaattgttacttttagatgatatttcatatttcctgccccaccctgtcagcacatggcaaggcggctttttctgtgcctatgtcagggagcatgctatgagtggccatgtgccttatggaggggacttagcctcccaagggccatcttggagtcggctgggatcaaccatgctctgcttatcagccttcctctacatttgcctcatttatccaccatgatttgattttgcatttgcccccttgggctttgcttatccacaatggaagcgctgtatctcctctgtgattcttattatttatttatttatttttttttttgagagaatcttgctctgtttcccaggctggagtgcagtggtgcgatctcggctcactgcaagctccacctcctggggttcaagtgattctcctgcctcagtcttccaagtagctgggactacaggcgtacgccaccacacccggctaattttttatatttttagtagagacagggttttgccatgttgcccaggctggtcttgaactcctggcctcaagtgatcacccgcttcggcttccctaagggctgggattacaggcgtgagccaccacaaccagcctctgtgattcttgctttgcaatttctactgttgttacaggaacatttcaaagcccttcaaatttaaagtaacctgaacttggataaagttccaagtttttccaggagatgtgagtgcaaacctcagcaacaacatttttaacaatcaccctaatgaggcctctccacagatcctgctgtggtggttgtttggggtggggaacatctgagcagatgccctgagaattccctaggtcccatccttctggatctccagtgattcagcagcaggaactacagggctgggtaggacccaaaggggaagggaggctgcaacaggaagagatgctgctcacttttagcatgagagccactttgcttgccagtggactctatccacctcaccgtggcagccttaacagcctctggtttcctaactctctttgctgctgtcccctgcatgatctgtcctcccgcaatcccttccacacacacagcatgcttatctccaccccacacaggatgattcgccttggtttctgcatggctgtccgggatgcctcagtctccacaatgcccaagttgtcatagcaacacactgcgaggattggcctccacctcctcactgaattcatcacttccccatctgccctaccagtgacgatttctgtgaactcttttatgtgagtcagctcctgttctctaatccccaacatctttcttttctcatagctattttgggtggtttctctggaaaaaaatgttgattccctttgcctctgacaaagagttagagtaacaatttgagcacattccacatgccaggcctcatagcaaaccttttacgtggtttatctcatttgctgttggcaacaatattatgagataagtaccattatggtgccagatttatagataaagacattttagcttgaagaagttcaataattttcacaaaattgtgttctctaaattttagagctgggctatgaacacagagcctggctctggccacattgacattagtcaagtacattctacaataaaattgctttcctgcttgtgattgaaatataatcttctattagtgacactcacttcaaaatgccactctataaactgattgagtatagttctcaaaaattgaacgatcatcttttcattgagtagaatttttattctatagaaagaataggggattctctactacacccaaaatttctcctcacagcagatgaattatttcaattacatattaagctctaaagaatagaggttttatggaatttgcaaagatttataattggaaatggaccaaattattctccagaagtttctccatgttttaatgatatcatcctaaagaaactcttgagttgctttttctacatgaactatatttaattaattcttaaaattgatctcctataaaaaagaattttcttccagaagaccttccaggaaataaaagaaacaacatttacaaacagtatgaattagatgtcaatctaaaacagaaagggctgagttttaattgtcactcactgtgattctaaaatgagtttggggctgggcatggtggctcgcacttgtaatctcagctctttgggaagccgaggtgggcagattgcttgagcccaggagttcgagaccagcctgggcaacatggcgaaactctgtctctacaaaaaatacaaaaaaagtagctgggcatggtactgcatgcctgtagtttcagccatcaggaggcttaggcaggaggattgcttgagcctgggagggtgaggctacagttaaccttattgcaccactgcactccagcctgtgcaacagagcaagatcctgtctcaaacaaacaaaaaaatagttaagaaaaaaagttaatctctacatcccaagctcatatatataagataattacttgtaattttaatttattacagttttaaatttttagccatgaaacaatttagcaagcaaggcacttgaaagacatatttttgttcttggagatcctgcagttcataaagttgatttctactgaggggacaggtggggtgtctgggtctctgctcacttagaacttgactttcagtgactcctaagtaccctcaatcttacaaaaaaattggatctctatcagtgattgaccacacgtggtgtctttagtgttatatcctcccctttgttatgggtccttcctatttagaagtccacggatcacttcctattgcaactggagtctgaattcactaatggtattgtaaagtatgtgccaaattatcaaacccgcacaaaggaagtagaaactggtaagtatggctaaggcaagagatttccttcctctctgagtgtgtcaagaggagttgagatatttgggggtagggtgggggtggggggacctaagccacgaaaatcctaaatgaataatctctttaagagaataacaaaagatttcacagaggaaggttttgtaatatacacatctccgcatctgaagatatatttaatggccaatttgaaaatgtaagcattattttagtaatttagaaaaatacccctaaacacagttatagaaattagatctgcatattcaaggtgagaatcgcaatctttcttagtttttactagtttcctttctgtaactcaattagaacttcaagtattgttcactctgagtagatcttcaggctctctaaaagcagggccactccagcttgcttgtcagtagttgcaatgagtcacagctggaacgtcctgtggttaacattctgctctgaaaacagaatcagaatcagtgagacggctttccatggtaacctgtatttgtatactttgaaaaatgactgttcctttttgtgtggttttgggtggtcaatttgcgcgggaatgaattgtagaggtgacgttacccatctgtgtgaatataaacaaaaaacctgattttattaacggcaaactttaaaaaacgaggtatgagtttttttttttttccttttcgagacattgttctacacatttattactagattggacattatatttaagcattttcataaatgtctatttgatgcttattttaatgcataattttctccccccaaaggcaaaaagaaactaattgtcattcatcagtgttgccccccaaacctactgcctagcccctccacccccacccagtacttttacaatgtgttattaaagaccactgaacagctgagatccaggggtctccttcaatgcgtaatcccatccagaaggaaggaaaaaaaagaaatctctttaagtcacgtgaaaatgccacatttcttaatcttgcagagctgacaggcaaaaatgctatgctgttcatgaccttgtgcaggattgaaatataattccgcaacatgctgcgacctagtattccgtaagacacatcgagcttagggtgattatagttatggagaaatcttacctatgttttgttggataagggttatgatgacttagcctgggctcagaggcctgacagaaatgaaataatttatgctttggtcactaaattacaatccaaaggttaagatttggggagtgaaagatggtagagcatttgcttgctaattactccactacttgggagcagtatgtttgtttctgtgctaattagtttagaactgtacttcatgccctagaattaagaaaaactctaaagctgagatgaatctcctgcagggaagcagggatttagaagcacaggctgcaaggttggcctctcgccctccggtttctccgcctgcaggagagggtgggactgaacgctaaggtgaaaagcttctgttccgtttcgtttccctcttcattttctgttgctttattcttctcttattctcccctattcattataggggaggcttctgataaatgtgtagaatattagaaacttgataataaatatacacattcaaagcagcagtacgaaaaacagaaaaaaaggaagctacagcagtaagcctgaaaaataaaactcatctttattcatttgcttaaaatgcttaggtttagtgctttggggtgaatgacataataggcttctgagcttgtctttttaaaaatatctgctgaccttccctgaaatctcacaagcacttatgatgagcagccgatttgagaactcagcgagacaggccaaggtttaaaaatctgcgatttatcataaccttaaacaaggccctcacctggttctcccttctacggagtggcacaaagggtccaaatcctttatggtctaagaggagcctgttgaaattgaggattgtatggcactactacctatctaactgtacagagtgcaaataatcgtgcagattgggtcctaagtaaaataaatacagctggcgggggaaatcactgcgttcattcattggagatgcatggggaacctgcctttatcaaagccctgctctgggcagtgaggggaaggccagaggtggtctgtgctttaaggcgactcacaatcagtaggggaggtaagacacacaagcccataacaagaatgcctggggatgtgatcatttccacaaaagaagcacagatgaaaagcaagggctttcaaaggcagactaatttatgcctgactgcagggattaggggcggctccatggaggtgctttgtaacatttggtggtaaagttctccacactcaaatcaatatgtttcaaacaatatttcatgtcataacattttttttcaatgaaaataatttgatcagtctggaattcattgaatccagattatacatttatgcacggacacgtgcaaacacacagacactcacacatactcttaagtagatgtactctccaagggcatcctcgaggaaatccatgagtccattaccaggtattttatgtttcgttgtcatgggcagcttatcccaagggtaactggaacaaagtgtttaaagggaacatgaaggcgattaggtgaaaatgtaatggccttagtcctgaggaagccagtcttgttggattgccattatctttctcaagtgaagagatatagtagagagatttttgtgttttttaatttttatttttcagtttggagatatacagctgataaaatcattaaatgaggtaggttaaggggacacaaccttgcaccctccatttctccttgaagatgtataaatacctcaatggaaaaatggacgaagacatcagtaaacaatttacaagagaagaaatctaaatgcccctaaacatgaaaaaaaaaatccttcaatgtcaaagtaattaaaataacacaagttaagacaattacaaaaaggcagtttttcactgtcagtactagtttaaaacatgatcgtcatcataattgacaaagctccactgaaagaaacacctctgttaactgcttgtgggaggataggttggtataaactttctggtaagaaatttaataatattttataaagagccatatgattatactgtttgttattccctttctaggaatcttttaaaagaaacatttgaagtatcaaacagctatttatatcagcaaaagattggaaatatcttaaatgaaacaacaatagaattataatataaatacattatatttgtggcattttacaccaaggtttacacaattaagtgatatgttcaatgaaaaacaagaaacacaattaaatacatagctcaaatgtataaacacatatatacacctgcacaaataggtatattacacatatatacaaatgaaaaaagtatcaagagaaatttttggatttaatgaaatattaacagtgtttgtctttagtcgaatcaatatttgtattttcctttttcatatatttctaaaatgtctgattattttacaggtagcatttattttaaaaattacctcttgaagggatggctaccccattttctatgatgtgattattatacattgcatgcctgtgtcaaagtatctcatgtaccctataaatatatacacctactatgtacccataaacatttaaaaatatttttaaattatatcttacaattataatagctgctattcattgagcccccctatgtgttgttaatatgtgaatgcctactatttccgtattctgagcctgaattatactttggacttgctaggttgacataaaaccaaaagttactagttgggtttccaaatttattgggcttaggaatcagatccatctctaataccctctctatgcaattatcaatttttaattcttatgttgagttctgtgtactcaacccacctcagcagatttacctctaacttttgaaccaaggaacagcttttgctacttgtgtagacttggatttttccatcccacaaaccatgtgtttttatatgggaaagtttctcttcaatttcagctctatgatggaccacggcagatgggacgctactgtggagtagacctgccccctccagggagtactacaagctccaagcttcaagtgctgctccttacagatggggttggccgccgtgagaaaggatttcagatgcagtggtttgtttacggtaagccaggtgctgatctcagttgtatttgcagttgctatttggccaagaattttttctttttcagttccaaacttagaaacaataccatgaacaaataatggaacccaggtagtaatctcatgcaagggtttaagaaatatacttagatattggtggaacttggagagttaagtctgttaggattaagagaggaagtgacatcaaagtggaaagaatttggttaattgtaggtgtagtaataaattgccttagataaagaaagaagcagaatgaagtttctagggatgaagagttgaacctgggtatagcaagctaactgcaagttggggtgggagtatctcaggtgcaatggaatagaatgagacttaaggctcaccttgacgttaagcagagaaagggtagggatagactagaaagaatgaaagtcagacagggatggggaaaaggaaggggtagggttggcctgagaggaggagaatttgagctgcgatgcacaaagccaggggcatgtgttgtacttgtcaaacaggaaggggcacatctggatcccacctacgaattggtggttcaggaagcaggtagggatcatcattcctctgaagatgaaaggtcttctttaacaagagatctgaaatgtcttcaaatctcaggtgggccaatctgcaagtggagagccccagagcagtggttcccaaaatgtggtccctagagagcagcgtcagcattacctggaacctgttagaaattcaaattcttgggccccatcccaggcctacagaatcacaaactttgaagtggagcccagtaatctgtgtcttaactggtctccctggtgattaaagtttggaaactactgagaggtgaagccggctgagcttctgggtcaggtggggacttggagaacttttctgtctagctaaaggtttgtaaatgcaccaatcagcgctctgtgtctagctaaaggtttgtaaatgcaccaatcagcactctgtaaaaacccaccaatcagcgctctgtgtctagctaaaggtttgtaaatgtaccaatcagcggtctgtaaaaacggaccaatcagtgctctgtaaaatgtatgaatcagtgctctgtaaaatggaccaatcagtgctctgtaaaatggaccaatcagcaggacgtgggcagggccaaataagggaataaaagctggccaccctagccagcagcggcaacccactcgggtccccttccacactgtggaagctttgttctttcactcttcacaatgaatcttgctgctgctcactctttgggtccacactaccttaatgagctgtagcactcactgcgaaggtctgcggcttcattcctgaagtcagcgagaccatgaacccaccggaaggaaaaaactgtggacgcatctgaacatctgaacaaacaaaatccggacacaccatctttaagaactataacactcaccacgagggtccgcagcttcattcttgaagtcagcgagaccaagaacccactggaaggaataaattccggacacattttggtgacccagatgggacaatcaccaagcggtgagtaccactggacccctttcgcttgctattctgtcctatttttccttagaatttgggggctatataccgggcacctcttggccagttaaaagtgactagcatggccgccagactaaagacacgggtgtcaggctttctgggaaacggctctctaacaacccccaactcttcggagttgggagcgttggttggcctggaaccagcttccgcttttcctgtacttctgggctgagctgagggttgacagagaggaaagccattcagctctggggtcccaacaacaagttggttggccctgcagccatgagtaaaactctcaaagtcatgtcacccaagcaagacttgcccatctatcctatctatcctgacccttgcctcctgggtcctaatgcctgtcagacaaatttcctctcgcctctcttctctgaggctagtcccgcttctaaaaaccactccctgtctctgttgcttttctaggttctcctgtaagaatgatttctaatataaactccaggactctgttaccttctttaggcacctgggttcaccaatcagaaagacataatctttgcccaaagccccattgtagggggtactatctggaattttaggatccctcctcagacaagcaggcctatcaatagctattcctgaagctaggatatgggtagcatcagaaattgtatccttcctattcatataagtgaggacaaaaggcatcactcttccaactctggagatcccttcccttcctcaggatatggccctctgcttcatttttggggcataacacctttatacgatgcgggtaaggtcccagtactaacaagagaatgcttaggactctaacaggttttcaagaatgtgtcagtaagggccactaaatccaatttttcttggtcctccttgtggtctaggaggacaggcaagggtgcaggttttggagaatacattgataagggccactaaatctgaccttcctcagtcctccttgtggtctaggaggaaaactagtgtttctgctgctgcgttggtgagtgcaactattctgatcagcagggtccagggactgttgcgggttcttgggcagagggagaaacaaaacaaaccaaaagcacgggcagttttgtctttcagatgggaaacactcaggcatcaacaggctcacccttgaaatgtgtcctaagccattgggaccaatttgacccgcaaaccctgaaaaagaggtggctcatttttttctgcactatggcctggccccaatattctctctctgatggggataaatggccacctgagggaagtataaattacaatactatcctgcagcttggccttttctgtaagagggaaggcaaatggagtgaaataccttatgtccaagctttcttttcattgaaggtgaatacacaactatgcaaagcttgcaatttacatcccacaggaggacctttcagcttacccccatatcctagcctccctatagctccgctccctattaatgataagcctcctctaatctcccccacccagaaggaaataagcaaagaaatctccaagggaccacaaaaacccccgggatattggttatgtacccttcaagctgtaggggaaggagaatttggcccaacccaggtacatgtccccttctccctctctgatttaaagcagatcaacgcagacctggggaagttttcagatgatcctgataggtacatagatgtcctacagggtctagggcaaacctttgatctcacttgaagagatatcttgctattgttagatcaaaccctggcctttaatgaaaagaatgtggctttagctgcagcccaagagtttggagatacctggtgtcttagtgaagtaaatgataggatgacagctgaagaaagggacaaattctctactggtcaaaaagccttccccagtatggatccccactgggacctcgactcagattatggggactggagttgtaaacatccaatgacctgtgctctagaaggactaaggagaattaggaaaaagcccatgaattattcaatgatgtccaccataactcagggaaaggaagaaaatccttctgccttcctcaagtggctatgggaggccttaagaaaatatactcccctgtcacctgactcactcgagggtcaattgatcctaaaagataagtttattacccaatcagctgcagatatcaggagagggctccagaagcgagccctgggtcctgaacaaaatctggaggcattattaaacctggtaacctcggtgttctataatagggatcaagaggaacagacccaaaaggaaaagtgagatcagagaaaggccacagccttagtcatggtcctcagacaaacaaaccttggtggttcagaaaggacaaaaaatggagcaggccaatcacctgggagggcttgttatcagtgtggtttacaaggacactttaaaaaagattgtccagtgagaaacaagccgccccctcgtccatgtccactatgctgaggcaatcactggaaggtgcactgcccctgagtgcagtggttctctgggcaagaagtccccaaccagatgatccaacaacaggactgagggtgcccagggcaagtgccagctcatgttatgacccttattgagccccggttacatttaaccattgagggccaggaaattgacttcctcctggacactggcatggccttctcagtgttaatctcttgtcctggatgactgtcctcaaggttttaccatccaaggaatcctgggacatcctgtaaccaggtatttctcctacctcctcagttgtaattgggagactttgctcttttcacatgccttcttgttatgcctgaaagtcccacacccttattagggaggaatatattagccaaagctggagctattatctacatgaatatggggaacaatttacccatttgttttcccctacttgaggagggaatcaaccctggagtctggacactggaaggacaatttggaagggtaaaaaatgcccacccagtccaaatcaggctaaaagaccccaccacttttccttatcaaaggcaatatccctcaaggcctgaagctcataaaggattacaggatattgttaaacatttaaaagctcaaggcttagtaaggaaatgcagcagtccctgcaacaccccaattctaggagtacaataatcaaaaggtcattggagactagtgcaggatcttggactcatcaatgaggtggtggttcctctatgtccagttgtactgaacccctgtaccctgctctctcaaatgccaagggaggcagattggtttgctgttctggacctcaaggatgccttcttctgtattctcctgcactctgactcccagtttctctttgcctttgaggataccacagaccacacgtcccaacttacatggatagttgtgccccaagggtttagggatagccttcatctgtttgctcaggcactggcccaagatctaggtaacttctcaagtccaggcactctggtccttcaatatgtggatgatttacttttggctacctgtttggaagcctcatcccagcaggcgactctagatctcttgaaatttctagctaatcaagggtacaaggcatctaggtcgaagacccagctttgcctacagcaggccaaatatctaggcctaatcttagccagagggaccagggccctcagcaaggaacgaaagcagcctacactggattatgctcaccctaagacattaaaacagttgtgggggttccttggaatcatcggcttttgctgactgtggatccccagatacaaggagatagccaggcccctctatactctaatcaaggagacccagagggcaaatactcatctagtagaatgggaaccaggggcagaaacagccttcaaaaccttaaagcagaccctagtaaaagctccagctttaagctttcccacaggacaaaacttttctttatacatcacagagagagcaggaatagctcttggggtccttagactcatgggacaaccccacaaccagtggcatacctaagtaagaaaattgatatagtagcaatagtcagaggctatcaaaataatacaaggaaaggatctcactgtctggactactcatgatgtaaatggcatactaggtgccaaaggaagtttatggctatcagacaaccgcctacttagataccaggtgctactccttgagggaccagtgcttcagatacgtacatgcacggccctcaaccctgccacttttctcccagaggatggggaaccaattgagcatgactgccaacaaattatagtccagatttatgcagcctgagatgatcttttacaagtccccttagctaatcctgaccttaacctatatactgatgaaagttcatttgtggaaaatgggatacaaaaggcaggttgtgccatagttagtgatgtaaccatactgaagtaagcctcttcccccagggaccagcaactagttagcagaactagtggcacttactcgagccttagaactgggaaagggaaaaagaataaatgtgtatacagatagcaagtatgcttatctaatcctacatgcccgtgctgcaatatggaaagaaagggagttcctaacctctgggggatcccctattaaataccacaaggaaatcatggagttattgcactcagtgccaaaacccaaggaggtggcagtcttacactgctgaagccatcaaaaaggggaaggagagaggagaacagcagcataagtggctggcagaggcagggaaagaccagcagaaaggaaagaaagagacagaaagtcagacagagagacagagagaggaagagagagacaaagagggagtcagagagaaagagaaagaaagagaaggagacagagagatagaaagtcagagagtgagagagaagaagagacagagagacagagagagaaagagaaagataggaagtcaaaagaaggagacaggaagagacagagagaaagtcagagagagagagaggaagagacagacaaagtcagagaaggaaagagaggaagagacaaaggagtcaaagagagagaaagggatagaagtagtaaagaaaaaacagtgtaccctattcctttaaaagccagggtaaatttaaaacctataatagataattgaaggtcttctctgtaactctgtaacactccaataccaccttgttgtcagtgtaaacaagggcataacctgaaagcactgaggccactgacaacccatagcattcctatcaaacatccttaacccagcaagtttcctaacaggggatctaaatcttaattaccatacaaaggtcccaccagacataggaggagctcccttcaggacaggatatagatggttcctcccaggtgattaaggaaaaagacacaatgggtattcaggaaactcttatggaagcagagttaggaaaattgcccaataattggtctgctcaaatgtgcaagttgttttcactcagccaaatcttaaagtacttacagaatcaggaaggagccatctataccaattctaagttaatatggatggaatgaggttttattaatagcaaagaaaaattaaaatcccaaacttacaaggttttctactaacgtagagtttgctaaaagttaacagtgtaacatgcattatcctactaccacacactctcaaagcatttctcagacagtttgcaagaaataacaaaatctgtccagtaaggatagtaactacaatcccaaatagactcttcggcagcagtgactctccaaaactgctgaggcctagaccctcctcactgctgagaaaggaggactttgcaccttctttgggaaagagtgttgcttttacactaaccagtcagggatagtacgagatgccacgcagcatttacaggaaaaagcttctgatatcagacaatgcctttcaaactcttataccaacctctggagttgggcaatatggcttctcccctttctaggtcccatggcagccatcttgctattacttgccttcgggccctgtatttttaacctccttgtcaaatttgtttcctctagaatcaaggccatcaggctacagatggtcttacaaatggaaccccaaatgagctcaactaacaacttctatcaaggacccctggaccgacccactggccctttcattagcctaaagagttcccctctggaggacactacaacttcagggccccttctttgcccctatccagcgggaagtagctagagtggtcatcacccaattcccagcagcagttggggtgtcctgtttagaggggggattaagaggtgaagccagctgagcttctgggtcaggtggggacttggagaacttttctgtctagctaaaggtttgtaaatgcaccaatcagcgctctgtgtctagctaaaggtttgtaaatgcaccaatcagcactttgtaaaaacacaccaatctgcgctctgtgtctaactaaaggtttgtaaacgcaccgatcagcactctgtaaaaatggaccaatctgcgctctgtaaaatggaccaatcagtgctctgtaaaatggaccaatcagcaggacgtgggcagggccaaataagggaataaaagctggccacccgagctagcagcggcaacctgctcgggtccccttccacgctgtggaagctttgttctctcactcttcacaataaatcttgctgctgctcactctgggttcacactacctttatgagctgtaacactcactgtgaaggtttgcggcttcattcctgaagtcagcaagaccacgaacccaccgggaggaacaaataactccgcactacctttaagggccgtaacactcatggtgaaggtctgcagcttcactcctaaagtcagcgagaccacgaacccactggaaggacgaaactgcggacacatctgaacatctgaacaaactctggacacaccatctttaagaactgtaacactcactgtgagggtccgtggcttcattcttgaaatcagcgagaccaagaacccaccagaaggaataaattccagacacactactgtcttagagtgatctagccctggaacatgtagtgcttgtgggtctcatagcagtagttctcaaccatgatgctagagctcattggtgtatttcaatcaactggaaagagaagtggagttccaagattataccaggaaccaagcatagacatctaagctgtggccctgctgtcaaaatcagggctgagctctagctgagcacacatgaatgtgtgcagtggttgactcttaacattgttcacattctggtgcactcattataggaatgtcagagctacttataactgaatagccctattatacacttaggagtgctaggcgttctgagattataaactgggctctgagtgtatgtctgttaaaatatgtatggggctttcagtatttaaaaatagtcagtggtcatccacagagctacttgcagcttgaaacgtacattaggaattcccaaagtaaatgagttgtgataactaagcttgtagaagttctggaccttcctcttcatcaagtgagtagatatttatatatttatttatttatttatcaagataggatcttgctctgtcatccaaactggagtgcagtgtcctggtcatagctcactggagccttgagctctgaggcttaagtgattctctcacttcagcctcttgagtagctgagactacaggtgtgtaccactgcacctggcatttttttttttttagtagagttgaggtcttgctatgttgcccagtctgatcttgaacttctgagctcaagcagtcctcctgccttggcctcccaaagtgatgggattacaggtgtgagccactgcacctggcccaagtgggtagattcaacctaagtcaactcatggatccgttaaatgcagggattggattgattcatctctataatacagatgatctgtagtattccgtgattctgaaacacatgattctaactagagacagtgtgaaaagagacagaaaggtcaggagaatcctgggaaatggcccagaatttcaagggctggggcattctccagagcatacgtgctacccagatgctcctgtgcacatgaaccctggggatcttgttggatagaggatggggtctggggcaaggcccgtgaatctgcatttctaacaagctcccgggtaatgctgctggtgctgctctatggaccgctctgaggaacaaggtgagagcaagtgttgagactggagaaatgagatggtagaaagacagtatccctagagactggagaatccttctgagatgttgaaagggcacattgtactgtttgttttaatgacagtaggataatagcaagatctaaagcagagagaactttcccccagggacagaagtgtagaaggtaagaaatgttaaccaggaagcctgggctcagggccctggagagtgttctcagtcctagatgcaccattggaattgcctgggagttttaaaaagtgcccatgcctgggttccaatatccagagacaggattcagttggtctgcagtggggccctgactattgctaatttctaaatgctccttaagtgattcatccgtacagtcaggatggagagtttgggagggcagtgattttgctgattactttctcctaagtggctgcttcctctcccctccaggctgttctagccttactagcccaaggccactctaaggagcttgattgaacggtcatggcaggctgtgcccagattactgtatcaatgggctcttccagccaatgtgctgaatattctggtgaaatctctgagttttatgttgggaacatttttttctaccagttctacttggaatctgtcttcctttgggagagtcaaaggcaccctctgtctattctgctttcctgtttactatttcaaaactttctcccagttgctggaaacttggagccagagttatgcaacaaaatgttgccagctgggaccagaaccgaaatataaaattgttttttaactctgtgctgctcacaatatgtaaattatacttgggaggaaacttctggaaaggaatttttagtcatttagatctgtgcaaaattgactatcatattctacaggtatgcaatgccacaggtacacagagttcaatactctgcatctgaagtaggtctttagtttgagataacctgagaaggggagcccacagagagggcgagctcttccatgggagaggtcccgccatttttgatccattggagttaaatgcaagacgtaaatcatgatgtatcattcacgcatttgttcattccacagacactaaggatgtcttttgtgccaggtactgtgctgagacgggggacacagagtgactcagaccagcaggcctggtttctactctacagagctaggctaggtgggagaagcagacatcacgcaaaaacacacttaaataaatagaaaatcaaaaccatgagtagtgccaagcgggcacacacagggcatctgacttgggcccagcaggaggtcagggatgatctccacgcaaatgagacctctgaaccaaaacctaaaaaataagcaggagttaactaggcaagcaggataaggaaaaggattccaggtagaagaaagaccctgtgataggagggagtggggagagcccgagggacctgagaagtcaagaggatggaactgagtcgaagagaaacagcgctgccaaggtggctgcagagctaagcacataatgtggctaagcgcgcacacacacacacacacacacacacacacacacacgagcagggattctgcagccatggggccaaaataaatttaaaaattactctcaatgctcaagacacacacacacaccacacacacacacacacacggggagggactctacagccacaggactaaataaatgtaaaaattactctcagtgctcaagagacacaccacacacacacacacacacacacacacaccacacacgggcagggactctacagccatggggctaaataaatgtaaaaattactctcaatgctcaagtgtaattgtaattttttttttgagacgaggtgtcattctatttcccaggctagagtgcagtggcgcaatctcagctcactgcagcctcagccttttgataaggtgatcctcccacctcatcctcttgagtagctgggactacaggggtgcaccacttcacccagttaacttttgtattttttgtagagatagggtttctctgttttccaggctggtctcaaactcctgagctaagcaatttgcttgcttcggcctctcaaaatgctgggattacaggcatgagccactgagctggtcataacattcttaaatgcatttgtgtgagtgtgtgtaacatatcagaaggaaaataattagaaaggcttctccttgcacagccccgcaagggatgttctcagaatcaggtggagggctcaggacagccccgctaacgctggtcctggagttgctcttcgtgccctggccaggtcaagtggctttaaactcctagcctcttttcctcagaatcctatcaccttgcaatcccttccccctgccccaccctccccactggactcttttctaaactgtgcagtacgatctccaaacaccaagcagagagttcaaacttggcagcgacatcatttcctgagcactgcttctgaggaagagttcctacacacttcattcatttccccagttcatacacaaacgcatttacaaaatatgcttctttgtgaacgacacaaaccttctattggctttaagaaaacggatctacaacgaggctttatctgtgggctctttctgaacatggccatgcagacatgagacaaagtaacattgcagggccttttatgcgggtcctcaaagagggccccaccctggaaataaagaaatggccacagttgccctgtctctaatcggttcatggtattcagccttgacagcattgtccagcggctgaattcagccttggaggcctccatctgggttgcagggggagggggtgggggataggggtggggaatacagaagtttccgcaggctgtgtgaaaagtggcctcccaaccagctgcacagaccccctcgcctcttctggtcgttgctcccagaagccttctttcacttagtgatggaatccagcatacaaacaaggtcaaggagctttgtgagcgagagagtgacatttgcaaagggagcgaacccttcagctgggagcttgcaggagcagggctaaggggcatgtgatcaggaggtgatgtcacccaggatttccacaaaggaaaaagtggccttttctttgggaagatagatgacatcagcctctcaaatgggggctgggtccattttatcttccttttagctattaaggagatttctcaagccttgagaagtttcagaaattagaagagaacattttaaaaaccgtgtcaacatcttttatgactggctcggtttggatgtaagccagtgccttcttgactacctgtgggcatgaggcactgtaccaaagggcttttaaaaaacatctttagagcactggcagaaaaccgccatgaggtcggcagtgtttctcttaaagttagatctttgctccaggtctctttctctcgagtggtctttcattagcctttgtttatcactggtctttcgggggaattccttctcattcaaaaattttattccttttgtgacttagagtacatgtagtacgatttctgggaggttcaccctttaaagacaaaggttttatcttttgtaattctgttatccacttgtcttgtgtgagagaaaatgccttagggtgtgagggtgagtaagctgggctctaggagaagatctgctggacccagcctataatgaacaggcagctacaactgtgaatcatgttaattacatgattatttacatgtcaattacacataacctctgccagcagatattttttgagaagaagtttttcattcattcaaccaaccatccagcacatattttgggcttgttgtctaaatatagagagtattaatttgcttgggctgtcgtaacaaaaatgccacagattgggaggcttaagcagcagaagtgtgctgtctcctggaggctggaagtccaaggtcaaggtgtcggcagggttggtttctcctgaggcctctctccttggcttgcggatgctgccttttccctgtgtcctcacatggtgttttctctgtgtgtgttcatcctgatagctctgtgtgtccaaatttgctccttataaggacaccagtcagattggattacagtccattcagcttcattttaacttaattgcctctttttaaaggccctatccccgaggacagtcacattctgaggtctgggagttagaacttcaacatatgaattttggcagagatacaattcagcccataccagaaaggaaggagatcacattcttgactttggggagttagtcatagagtaggcaaggcaggtaaaccaagtgtagaaatatatacataatccaggacgccatgggaacacagaaaaaaatagctaggacagcctgcggaagttcaaagagacctccaggcagctttgacatttgaactgagttttaaagaatgggcaagaattgatcagacaaatatctgggagaggaaggcttttctaagtagaagcagcaaggtgtgagggcacaaaagttttgcaaagagcaagtccttcagctagaccacacattctctgcattctccattggggcagtatcaactccaaggaggtaaaattggctcttggtagggggattaagaaattcttactctttaatgtataaagcataaagatatacagtacataacagatatgcaatatacttgtggtattaaattttcatggttgagaatttggaaaaaaatgtccgaacaatctccttagggggctgataatgaacaaaaggtgagaaacactagggaaagggagtgatagaagttgacgcaggacacgttatcagaaaccaactgataggaaacatcacaagaatttggattttatcctgccatcagggaaagaccaccaatggatttttaagtgggaaatttagtgatgcaaacagaagtacactttagaataagagttctggcaagtagagggatgcccaagaagaggaagagactgagagtttggtgactagtcagagcagggagaaaggaaatgagtagtgggtgaggcagcgtattaaagagctgtttagggctgggtgcagtggctcacacctataatcccagcacttcgggaggccaaggcaggtggaccatgaggtcaggagtttgagactggcctggcccaccccatctctactaaaaattcaaaaattagccagctgtggtggtgcgtgcctgtaatcctagctactcaggaggctgaggcaggagaatagcttgaaactgggaggcagaggttgcagtgagccaagatggcaccactgcgctccagcctgggcaatagagtgagattctgctaaaaaaaaaaaaaaagagctatttagaaggtaggatgggcagatctgatggtggagtagatgtgtgtcaatctgggagacagaagaaggaatcatggatagctcccgttttcctgcggtgtatgatttggtgcatggtggtgccattattcatagataggaaatcccagataaagaccatgtttgggggaaaattgtgagcttctatttgaacatgctgaatttgagatgttcaggggatgtatcctttcagcaattgctggtgtcagtataaaaattaggtgaggttttgggccagagaaagagactttggaataaactacatgttggtgaatttggagttgtgagcatgatgaaatatatatccaaaactgtgcaaggtatttttaggcatatgaaagaaataccacgttagtctttgtcttcaagctgagcatgatcagttaggaagcaggtgtagaaaactaacagaagtgctgaactgtgaggtgcctattgcaaggctagtaaggaggctggaagtcattggggaaaatcttcacggactctgtgagattttagagcccttgaagaatgatcaggacaagaaatgacagatggtgcctggataagcatgagccaagaaagagagagaaacaagcctgatgtaatgaagacagtgggatatgaggcttcgtagacctcctgggctagattctttagaattctcaaagccagctagactagtgtgaacttaacgtagtaaggaaaagggaaccactgttgttttagacaatggagtgggaaatgtcaagggaggagattacaactggagacatcatagatcacagtgacagaggcaaccccaggggaccattctgggtcctggttactaagagcgaggaatagcggtctgcagagacaagacaactgatgatccaaggtgagtaacattctgatgaatcctcagcaaagacactcaagggctatgtggccagtgctgtgataaatcctggcacagaaaatattagatcaattgccgcattctctcttcctaataatttcttcaaagttataactttgaaatacagactcatgattacctaagttttccagtttgaaaatgattttagggctcttttttgttattgaacaaaaaacttttgttgaacgaaaaaattttattgaacaaaaaatgttcaatttaaaatttttattattgtgtgtccttgctgccacgtggtgaaaaaattcacaacaatctggaagtatgatgttggcaatgaaagtgatttatgaattgtggtcagcaaagattctagcgcaggttcacagggctgggctgtgaatcacactgtctggttctaatctcaggcgcagaccttctctccgttggtaatggaattgctttcacagtgtcgcttcctgctaggctgtgatagacataatgtcacacagagagaaatggtaaagcacccatccatccgcctccaaagtaacctcaagaatttgatgtcagataaggaaatcctgcttggttttggtagaaatttaagtaaaagagaagcttttaaaaacaactagctctgtttaagttaagagatatttccctaaatgctgactattctttctctcacatttatacatgctatatcccatcctgtttatgatggctttttcagcctatttgatattttgggcttttgtctttgtgatactcttaaaatatttttaagcatggagactggaaatgagttccttcttagtgtggaaccaaagcacaggtttctgcatcgtgatactgagtctgatttgtatttatgacaaattttcacttatatcttttctgcaaagaaattcttaatggacgatgctcatttctaagaaatctgtttctaaataactccttgttgtaaagttgggatagtgactaagaaaatcccacagctcttttggccttgacttcagagtttctccagcaaggtcccaatgatcagaggcagcattaaagctgtgcatatgcagacctttcagaatgagtggaaaagctcactcctgacatttctgcctccttgacgacagcagtaaatacacatccacacagttgaccttcatctcatgttggctctgagtctcttcaccagcaagggcctctcaggagtctcgcctccccattcccatgtcgccactgtttgaaaaagttggagttctatttctattgccactctttgaaacagttataaaaagaaaaaaaaataaccctcaaaccaccatgaccttcccaaatcacagattgcacaatttgtaataacagtccttgagatctgggccaaagaaagggctttctcgaaacttctgtttgtgttctggttccctggcaacaatatccccaatagaggaatgcatgtactttgcaggggattccacactttttcgtatgacacaaaaaccaaaaccacacttttttttttcagtttcaaatatcatagcagccaaaaatgaagtgtagaaacttgagttctaagccaactcagaacaaatgtgacgttcagcgtagaacctgaatttttgtccccagaggtttctcttttcgaccattgacttaaatgttgccatatttgtttcaaacattacatatccaaggacttgttttgtgtgaatgcactgtgtactcagaggaacagaggaagcagtgccaggtggcagcagcattgtctcacaaacagaacaaatctggtggaggacagtaactaccacttataagagttagtagaatttgataatctgtagatcagtaatgacaataatatactctgtccctgatttttttctcctcctagttccacaggctactcaaatatagactattttgaccctgtgtaccaaaataatgaaattgaaggaatgcaggataaataatatagattttaccacctaaatgtaatcttaaatttgtctgaagatattatgataaaaataaactatcttgccatgtaaagagtgaatgaaaatatgattaaacgcttagtgcattggtttaattgacatctcattcactattactgttgttgatgttatcattttaaaacatgactcaacatgtgtaatttaaaaatatgatcttgagaagtgaagccagctggacttcctgggtccagtggggactcggagaacttttctgtctagcttgaagcattgtaaatgcgccagtcggcgctctgtggctagctaaaagtttgtaaatgcaccaatcagcactctgtaaaaacagaccaatcagcaccctgtaaaacggaccaatcagcactctgtaaagtggaccaaccagcgctctgtaaaatggaccaatcagcaggatgtgggcggggccaaataagggaataaaagctggcctcctgcgcaccagtggcaatccactggggttgccctgcacgctgtggaagctttgttcttttgctcttcacaataaatcttgctgctgctcactctttgggtccgcactacgtttatgagctgtaacactcactccaaaggtctccaccttcactcctgaagccagcgagaccagaaacccaccgggaagaatgaacaactctgcacacaccacctttaagagctgtaacactcactgtgaaggtctgcagcttgacacctgaagtcagcaagatcacgaacgcaccagaaggaagaaactccggacacatctgaacatttgaaggagcaaactccggacacaccatctttaagaactgtaacactcactgttcaggtccgtggcttcattcttgaagtcagcgagaccaagaacccaccggaagaaaccaattccgaacacaatctcatgtctcatcccaataattttcttaaatgagcattatcattcccttattatggatgagaaaactgaggaagaagcctgagacaagttaagtgatgtgtccaaacttacacatccactaagcaatggaatcagaacacaaaactcagtgtgtgatgtcaaactcaaaggccgtgcaataagtagcacgatggtgcctgaaagcaaatattttttccccacagcttttcattgcaaaaaaaggtcaaatgatattgcaatgcaaagaaggtcagagcttatagtaggtaattttataaattcccgtaataataaatgtttttaaaaagatgtgtgcaatcttacccaagtaaatggtgatccagtttcaaaggcttcccactaagtgacacaattcattctttctttaggttcaagtagcaataatatgtgggttggggcggaggggcgcattgctaggcaaaagacaagttcgaaatagctgatgttatttgcaatccttaaacacaatttctgctttattactcatttataaagtgctgttctggagctgctatatatgttgctgatggaatccaccgatctgggagaaaccacggagatcatctggtcagttgccaaggtttagttatacaaactcgcttacaagagggagaagttatattaaagtgaagagtaaaagggtagctgctcccagaacaacttggccgggctagagtggaccatgggaatggggtggagcatgtgaggatttgggtaatttagttgtttttcttcccctaagctaaggacccaggctggctggatgcaggatttgccctgcgaggggcctgcagcatgggatgttgtaatcagagaaaacaaccttgaggctcagatttggacagagtttaaagggtcacagaacaccactgccatggacgtggtgctgcccacctgtgtccatttctccgggtggagtcctctccctgcagagggaaggttagaggttggaggaggtgagggaaggaatcagggagaggcctgcaatgtaggtccctggaggctctttgagcttttccctgcaagagccctgtgtaccaaaataatgaaattgaaggaatgcaggtttgaataatatttctaaatagaagtatgactgttgaacttggaaactgcctacagagaacatgttttctctgtctttgtttgtttgagggatttcataaagaagctttcagtagccttaggcatgactgcttatttcagggaaggttagtacagttatcttagtctcatttctttccttgtacctttttatactaaactttgtttagaagtcttcaatcatttcaaaaacatccaaggagagggaaaagagattgatcaaatgattgatttctcctgaagaattgtaagcaagggatttctactgggaaaccattttttaatttgattgaaattagtagcttaaaaggaaactgataaagttaatcaaagtgaaaagatgacaagattggctaacttctctaggttaagacgaaagatagtatccttttgtatacaggaaattaaaatttatattacacagaaactccaaaattatggcttctttggatttctttctctttgatgatgtactaaagggaaacacatcagtatttagatctaggccatcttagatagtcagatggctatgacagtcttaactttgagtatttatatgacatcttgaataggaatgtaaaggtcattatatagcggtccacagcattgatttctaagcttcttgtatctgttttccaagtcactgacttcatgcaataacttattctttcactgttttttattgtatctctaccattgaaacccgatgctctactttatatccactgctgtatagaaattagtcgaataaaatggattatcacaaaatatggggcaaggatgaagtctccatggaacatgaaactttctaaacgttcattgactctccaacactaaaaatcgttatgacttaactccctggttcttgggtttacctgtttcttcctgatgtgatacctggccctgtatttgctgctagttttctcaacaatagaccttttctgttttcatgaaaatcttacccttgaccaaccatcctctaaacctcaagatgacaaataggaagtaataattacaagatggaatacagaaagtttacaaatgtgcactccttgaataccacacaaatagttgttaccattttgtacctacctgggagtttggccacctcaattatcagggaaagaatgaggatacattagcttcttagggctactgtaactaagtaccacaaactgggtggcatgggacaacagaaatttgttctctttattctggaggctggaattccaaagtcaaggtgttggcagggtcatccctctgacggctctagggaagacccttccttgctgcttctagcttctgttgattgatggctgtctttggctttctaagccttgtagatgcataactccaatttctgcctctatccacacatgaccttcttccttcttggtgtctgggaccaaatttccctcttcgtataaggataccaagaatattggatttcagttccaccccaatccagtatgatctcattttaacttgactgcatctgccaaggccctttcctccaaaaaggtcacagtcacaggttcctggtaggcataagtctcgggggacagtgttcaacccaatacagggacaactctctcctctcctggagtcacgatgttttgtcctcttcttccttttcactctcttctttcttccttcttttttctcaaggaaattttatgttccttggcctttatattacttgattttcttctttgatttcatctcgtgatcactccagtttgtgtccccttcctcacagaatacatgctatctgactaaatccctcagaaaaatccatctgcacatgcttcatgtccttatgaatttgaggagctccacccttggccttgtgttcagagaggactagtgaccctagtaggacagatgcctatcacttggccacatacctgtgaaatgttggggaattaactggtaacatcaaaccaggaattactgactttttgtggttctcattacatgccagtcacctttggacaactttggccattttaaggagcacatattcctgtccacttccccaccctccctgacctgaaagtttctgttcaaaatccttgtaattacgtttttttatgtttcatagatgtatcggaagtgaggcctgtatactcactccaggaaatagttcactttgccttgggttgggccttccccagattctgagctcttagttaccaattcacatcacacctgccttaccaaaagggtccttgctggcagtttctcttctgtgtcctcccttcctccacaagctgcctttttttttttttttttagatggagtctcactctgttgccaggctggagtgcagtggtgtgatctcagctcactgcaacctccacttcttgggttcaagtgattctcctgcctcagcctcctgagtagctgggactacaggtgcctgccaccacgcccagctaattttttatatttttaatagagacagggtttcaccatgtttgccaggatggtctcgatctccagaccttgtgatcggcctgcctttgcctccctaagtgctgggattacaggcatgagccactgcgcccagcccacaagccgcctttttacacaatgaaggcaaactggccttgccaatgaagcacatctcaaggtcttatagagcagaaagagtttttattgttaagttatagaaaaaaagctattaaaatataaattgagcattttaatgaagcacgtgaacatcctcactaattacttttaaaatttaattctctttcactgtgccttggcttttggcttcgttttaacagcaactgttgatttcccaggcatttcctttaggaatgaagggataagggtgggagggtgtcggtgatgaatcacttctctcttccttttctgccatcctctttgggctttagccatgtgtatttcaagatgttattcctcctgatgccatcagtttatggcatatagtttcaggaaaatgccagccagcaaagcgctgactgcatttgagcagtcgccgggcaatacagcagttactttttaaattttgtgccttggattccatttagctgtttcattactggtttgcttttattaaagctcttattaaaaacacacagatacgaacttaaagatagtacctacataggagattattattaaatgtttcagtactggaattttataactcatggcttgttttggacaaaaaccaaaacaatattagtgaagttcttttatgaaggtattttaagttatctacacaagtaagcaggtttagcaacagcttgtaactcttggttgttatgagttcagcagatcaatgtgcttcctgcagataaagcaagcacttcctttcggcagatgagtgagagtttggaggaaaatcaaggcaaacagatgatcagtcaccagctctaaaacttttataaagattaactctttaaaactgaaaaacataggcttctcttcagggcattattttattccagttcagctgatgtctaatgatgtattctgttagattttgcctcaaagtcaattaaaagatttttgctttgtttacgttttccaggttgctatggtgattgtcttcagtggagggacaggacagtaatgagggcagcattcaacattgttagttccgtgcctttgagctgaagttctcggcaaggcatgggggagagagaacacagaagtggaggtcaggatcggggagggtgggtgtcacaatagggttttgtacccacatctgccattcactaagtgatatgagcatgttccacagctttcttgaacctcactttgctcacctctacaatgggcctgacatcattgttacctgcctcccgttgtcatgattaatttcaaataaaataatgcatttcaaataaaaataattcaaataaaataaaagcacttgagaactgaactaccataaaaatatggattgtcttttaaaaaatttttgtgcaccttaatgaaaaaccaatttcttacctcttctctagctattcatgatagctttttaaccagtaattcctcttctagctccaagtctttgtctcaaatctggggataaagtcttgtgaggatacaaaacacggccaggtgtggtggctcatacctgtaatcccagcactttgggagggaaaggtggatcacttgagcctaggagttcaagaccagcctgggcaatatagcaagatcctgtttcaaaagaaaagagtaaaaaaaaaatgtaaagatagaatacacagcatgtgtgaaaggattatgatatgcacaacatttagctaaaaactttggattgtttcattcattctatgtaacaaccctatgaagtaagtattcatacagctatagatgaaagaaaggttagattacttacctaggaactatcacagccagtttaggaacccatttgtctgaactacagcccatgcttcctctgttacactataatgtttccaaaagttttgcaatctaacatgccaattaagcagttctaaaatcgtgtctactccatgaaaactttctcttaccaaagtgacaaagagccactgtgtctatttctctcaaaactctttattcctcatgtcactgttcctttcttggttggtattttcatctttttcatttttgagacggggtcttgctctgtcgcccaggctggagagcagtgctgtgatctcggctcaatgcgacttccacctcctgggttcaagcaattctcctgcctcagtctcctgaatagttgagattacaggcgcataccaccacgcccagctaatttttgcatttttagtagagacagggtttcaccatgttgggacaggctggtctcgaactcatgacctcaggtgatctgcccaccttggtctcctaaagtgttgggattacaggtgtgaactaccacgcctggctggtattttcatcttttaaattatcttcttttatcttcttttgaaaggcttttctaaatcattgtcatctattttagattatgaatgaccggtgttaaaaacttctgtatttcttttacattttattgttcattcaaccagacaggtaaccggatgacgacaaggatgttggtggtctaaacatccctgcctgtgttatttcctgatgggtattggtttatataacttctttcctctccagacttgtgtattctccatctctttttcccttccctgtttgttatccctttgtcatgcatccagagtcgcaaatatgactggtaatggcaggatgagttatttattcttatttgtaacttaccagtgattaacatgtaaaggatagaatagtattcaggttgttttcttcaaataaaaacttattgaaattactcttagtaaactgaaggagaagcaaaaagggtttaataacttgcaagaagacatgtgggcaataacactttttatgtctataaatgtctttctttttttcaagagatattaaatatgcttggcttctatagcactgcttgtattatgggcagatgctcaataaacacttatgagtgaatgaaggaataaataaatggaattgggaagctattttacctctttcaaattttagaaatacgaagacagttaagtttctaccgtaattaccagaattacaacgtgcaggtttgttacatatgtatgcatatgccatgttggtgtgctgcaccctcctagtactgtataattttgaccagaaagtaccactaaattaatctatcctattttgcatttgctgtgaacttttaattcaaatgtttccttttgatatgttaatcctcagaggtagtgagagcatgaaggagaaaaagaaaacttcagagatttcaagccctaactgtttctttccctctttctcatgatcatacaatatttttcctgacagagtatcacttataaaattgaaatttctcagctgggcatggtggctcacacctgtaatcccagcactttgggaggccaaggcgggtggatcacctaaggtcaggagttcgagacaagcctggccaacatggtgatgaaaccccatctctactaaaaaaaaaaaaagaaaagaaaaagaaatttttctttaagaagcatacatatatgtgctattaacaagatatacttaaaagtaaaattttgctctttttattaaagaaaaccttgtggattatttgctttaaatactaggaaaaaagacattgtgggtccatataactatactgtaatttttttaaagcaatactgaatgccccgaatctgtattaccattccagtttacagcgacaatttaagggtattagtatcctgttatttgcgaaggaattcacaaggaaatgtaaaacaattggaaaagacaatggaaaaatgttacacagagttttatgtgaatcaactaagataaaaaaattgaatcagattggctgatgaacgaatgctaaataaaaatgcagaaatgagctatctaaactttcatttccttcttatcttttatatcatgtggccataaagttattttcctctagattttttccattggataatttatttgatactactgatagaaagaaccatctgagctgaaaatgcaagttgagaaaaaaatttcagtaacaggctttgcttacctgtaatgtattttagtaaaaggtggtacatcttaacacgagttacatgaggcactgtgttgtaccactccggaagcatcctgttatagaatgtcctgtgagcggtgctccctggagttgggcattggtacaggagatacggacaatctgtgatgattttggcttcaggaatatttgccatgtgttgttgtagtcggacaaatattttctcatcttttacggtacttgtgtttttttaagattcatcatagtctctaaacaatgtcagcacatctaattttaaacagctttttcgtaggctttagaaataaaagccggaactttttaggacacaggaaagatattgctctgtgcaatacatttaaagtctgaaaacgcagaggttttcaagtgaaaggagactgagaagtcaagaagatagtagtgctttgagctagagtcagatttctctgccgaatcaagattcttagaattctcagtgcttctcagtgcagtggggaattctgcacggagattttttttttaactccttaacttttaaaagcttttcttctaactcactgtacaggaggaatttgcatagagtggacagtagacaagatctcagacttggtgtcttactttagaagccatggtagtttaatgttatgtgaaaaatgcacgtttactcataatggagtgaggaggcactgttacttttattttattttttattattatactttaagttctagggtacatgtgcacaatgtgcaggtttgtcacatatgtatgcatgtgccatgttggtgtgctgcacccattaactcgtcatttacattaggtattcctcctaatgctatccctccccccttcccccaccccatgacagaccttggtgtgtgatgttccccaccctgtgtccaagtgttctcattgttgaattcccacctatgagtgagaacatgtggtgtttggttttctgtccttgtgacagtttgctcagaatgatggtttccagcttcatccatgtccctaaaaaggatatgaactcatcattttttatggctgcatagtattccatggtgtatatgtgccacattttcttaatccagtctatcattgttggacatttgggttggttccaagtctttgctcttgtgaatagtgccggaataaacatacatgtgcatgtgtctttatagcagcatgatttatattcctttgggtatatacccagtaatgggatggctgggtcaaatggtatttgtagttctagatccctgaggaattgccacactgacttccacaatggttgaactagtttacagtcccaccaacagtgtaaaagtgttcctatttctccacatcctctccagcacttgttgtttcctgactttttgatgatcgcacataaaaagccttgatgaagaataagagaaggtaattggaagaatttaccaaccaataaagaatatttaaaaaaaaaaaaaaacagaaaaagaggcccagaaatgttaagagcaaaaaatgttttgttaatcaccaaaaattgctgttggaaaacaagataatttcttttctaattgtgtctctcataagccttcctcaaattttacctcttctgcaaagttttctcttcctctccatactgaaatctctgtctgaattcctgcaaacgatttgagagcctgtgcggtatagtaatgaagtattaagatacaaccagatcacctcagttagtatcctagcatcaattaaccttggaaaatccacaccacctctgtttgcactgatttgctcatttaagaattggatcctaacagtacctacctcatgtggtccttatgagtacggaaacagaaaacacatggaaagcccatatgaggactcaatgaaaggtggcattattctactgtgtgccgcaggctacagcatttgattatttgttgtcatggtctgcctgaatggctttctaaggcatgacatatcaagattctgaaacacatgctgttgtctttttccttggttggatttttctatatccattgtattttttttaatgtaaatttgctgagttaggaactatataatttacttgtttatttcttacagtctttggtacaaagctaaggatttttagcccttaaaattctagttcttagatctgcacgggactgcagaataatgtattagctacaaggacactgaaggcccagggacctgaagttcacgaccacggctcacacggtccattgtacttccgactatgttatgtaattcttaccttattataataaagaaaatctaaaattagaatgacttttttttaaagtacgaaggtttgatatggtaagaaaaaggatcgagcattattgtactaaattatatataatccagtgtttttgaaaggataaacttaataagttgtagccatgatttttttctcattgttttataactgcataattataactttattgtaacttaacggttttctcctaaattaagcattgtatatttttgatggcctttcggtgagttgaatttggaattattttccatgtgctgttgcccactttgaactgactgaacctttctgttttaacaggttgtggtggagagctgtctggggccacaggctccttcagcagccccgggttccccaacaggtatccaccaaacaaggagtgtatctggtacattaggacggaccccgggagtagcattcagctcaccatccatgacttcgatgtggagtatcattcaaggtgcaactttgatgtcttggaggtaggaagtgagatggttttttcagcacattccaaagtttggggtagaacaggaaatcactctgccaagattccgaattctttccagtagtcagcagtgttctattcttagacattttaatgagcatcagcccttcggtgatcatttggtagacatgggattaatgtgtggtttgggttttcctgaagcaatgcctgagggccttgcagcagctgagttaggaggtaatgccaggaagccggagcccaggacgagtgagtgaaggaaaggaggagggggaaccagcagagggagcccctgggggcaacttgggctccatccgctgggaccttctgaaggaccacagtggaggcactggtccgccaactctggttcccattggtaaggactgcacttgggatggctaacacctcacacttgcagtctgagaaagctcccccagaaagagcattcgtgtggcggagcatagagactgggcactgccaacaagcacagggatggcctaccagggctgccgctgctcttcaaggggccgccagggccatctgccgcagagcgcttttgtaaaaaaatggccacctaggtagcatgaggcatttgaagatgaaaattttcccagcacttctgcgaagggtgtgtcttggatcattaaaacagtctttgagaatcttgagcccaaaagtttattataatcaatgtttaattgcaggaatttagtcattagaatatgtgtgtgtgtgtgtatatatatatattttaaatatatagctttaaaatattttgttgtagtttataaaattatataattcattataattatataacgtactatatagttacattatttatgtaatattcttatataattttataacatatatagatatgtcccagatatatgtaatatattatgtagtatattatatacttacactataaattataataattaataattacaataattaatatttattataacagattattatattatatattttaatgtaagtatataatacactacatattatgtaatatgttatatatagttacatgtatgtaacacatttattatgtatactttgaactttgacctgtctgcaaactttaatatcttccaaatacacacaaaaatcctgtgacctcagctctagggactgctgtagcacagcatgacaaggattctatatccagtagaacctaaattccatgaggctagatgtttgtttgctttgttttactgctatattcccagctccacagagtacctggcaaagagtaaacactcaatagatgtttgtggaatgaatgaaagcatcaacgtctctgattgtcacaccataataatgcacatttagggcactgtacagaggaatttttacctccatgttctcatttaaacattaaatcgttccatgaggtaagaggggaattttattcccattttacagtggtcaaaactaacgctcaaaaagattaatgggcttttccatgaccacatggaaggggagtggaagagctaataactgaagccagtcactgctcaacactccagtaaatcctgagaccatagatgggtgcagggtgcaaggggtcgatatgaatagtatggacgttacaggaaactttaacaaaaactttaattataaaacaagttcttaccttgaaaagaaatggaattatcccctcagtgagagtcactaggaattacttttagtaattcatcacttttagtaatttagtaaagtcatccttctcagtgagagtcacaaggaattacttttagtggctctaaaagacttaccatttctatctctgatttcatttactgtagctctacagacaatttactattgtaattgtaaatgaaatcagatagaactggaaagtcttcacggaaggactgttgccaagtcatgactccatctcagaggagaaacaaggtgcctcctgaaattcacactcacagcacaaagtaggactagcatccatgtgcagaatgttcagatggcctcgctcgcctgcaaggatattgcttggttgcataagaccccttatcacttacaaagggctggaggtggatcttccacagctatgtgcaatgttccaaaccctttattttcatactccaaagtgcatgtgattgttgcccacttggcaaattataaatgggccaattgtgtttcgggttgtgtcatacccattacgggagaaagtagagacaggggctgttccctacaagcaggcctggggcctcagggacgaaatcagggactccaggcagaagcggctttcaaggagagccctatgcctgacagaaatggctgtgagaagacgcacagtctgcttggggcttatttttattatgacaagctgacattgcagtggcctcccgtgttccaccaaaagcagggtttgggggactgttctgaggctcttaaatatttggggaaagtttttttctgaaagctaaaaggagcaaccctctgacattttgttcaaaagccttgttttgcttttctgcaaatgttcatttggaaaacgctgtaataaaattgggctaatggtggtggaatggtttttttcacccctccctagctgctgataacatgttagtagtgggtttaaaagtttgttacccatgatgggcatgtgatctaaaaactttgctgactttctcagcctgcatgtgagtgtagtcaagtggggccttacagccactaagtattgggcttacctgggtttcacaaaatttattcagaagccatttttcccttgaaaaatcagagtccggaaagtggcccattgcaaaaagcagcagctgtttggttactcataaccccggaatgctgacttgattgtaacaataaatggagctaacagagcagaaagaaatgttcaaaacagattaaaaccataggctttgaaatgtcctccatcctgagcatttgctaaaacacatttttaaatctctgatcatcagaccacttctttttcccccaaagtttagtcatatgctgtagttgaatgaaccatgccctgaaattctttccatctttttcttcttttgaagagtcatgtactatcggttttatttgtggaagccagaaggaccattgtttcggtcatggaaacactctgcctgattttactttaatctctgagaaagtctttagagagattctgaactggcattaggcagaaaaggaaatccactccttggagcagtaaaccaggacaattgcttggtgtggacagttacctcagtctggcctctctgcgataggcttttgtgagctcagccttgcaagaagggaagtaaataatgtccaaagtggcagtgtttattcttctagaggcttctgggtccagccaactcatacccattatgtttgtgatctcaaggggatgtttgagcagagaaaacaaagaatattttgccgacgtgcgagttttctttgttagaacttaacacttggcgttcagtggtctttccaaatatgtgctgttgattgggcttgggtgattgggagcacatgctgtcagtttcatgctgtggggactgtgccctaggcgagggggtagggagatcttgaaaatgggaaagaaagctggctctacacaccatgcaagcttgcttctgccatttgcatatgtgtacgtgtcaggggccacacagggctcttcctaaagccctgcttttgatgggacttggggggagtgcacaaacatcagctcctcctaataaaaataagcctgaagcagtcggtatgcttcattcctttgcaattactgtccttgtgctcagccctctgtgtaacagccgtttcattcattttggcctttaccggatggctggggggaattaatcagacaaagaaatcattatagattcaaatcacacactcctccccaaagtaggcttcttgttctcactccctctccccagagaacacttgagtgattttcctatcagtcagcagtgggtcctgagggtgggcaagggccgggggtgctgaggaatgggggcagagtgtcccgaggtgggggaaaggcacagagggagggtgggagggcgctgtgcccagatccccctgagagccgccttcctggctctggtcctgagtgcctgtacatggatggctgcagttgcagttatgaaggtctcagataccaactctttgaaaactgtctcccaaagatggtctttcttttacaaatcgaagtttgaaaagacctgaagatgaggagtcagcatcttctatttgattcccatcctgccttcgccaccctccccagccccacacatacacacaggagataaacaggacccagaggagactgagaaacctgtctgtgaggcctcctggaggcctggcctaggctatccttgcctgcaagatgccctccgtgagcccaaggagactctttccagaggactatgtcactggggtattggattccagtcagacagacagtttgggagatttggaggagcctacgtggtctgaagtcatgtgtgatagatctagaagtgaaacaagagagttccctgaccaccccgtcgcaggacctgtgacaggggtgtggcacatctgttcggctgtggtgccctcaaaccccttatgggagggggagcatgcagattggcaggtgcaggaacccaggcaagatgctacccacagtacggtctagtggtgggtgcctgtgactctcaaagccctcatgggcaggctacagtattcttttagctctgccatccacagagggctcaagtgttaaccagctcagtgactcttggtacccgacttcctgtctggcatccaggaagaatcaggtcacacacggacttgaaggatggtgaatgtggggattttattgggcgatggaggtagctgtcattggaatggatggggaactggaaaggggatggagtgtgaagatgatcttccccatagagtttcgctgtgctgtggatgatcaactgtctgaccatccccggccaaactcctctcaacgttcagatgctccttctctctccttctctgccacgttgttcttctcctcctctgctcttctattcatctgcccatctgctcgtggagcctggagttggaggtttatatgggtacaggagatggggacgtggcaggccaaaaggcaacatctgggtgtggaaacaagaatgcctgttcccgtttagggccgtgggtttccaggcttggggatggggcctttgccagggaacctccctcttctacccagtgtttccctgtctgctgtctatatcagaaggagccatctggagactaaggcagagtctagggcaatccctgagcagaaaagtgggatgcacttagtcaggttcctgggcatgggcgtgctgggagcaggcacagggagggtgcatagcatccccttccttaggctccaaaacacacccagagagctggtatttccactcctcctaaagaagcatacgtgttatattcaatgtgtggtcttagaaaacattcagtttgcagggtaggtggaaattcctaaaaatataactgggatattggtagccttcagtgaactcaactttcataacaaaatggctttatgctaagactaatcatatgtgccagagttagaaaatcagacatttctttttttaaaggtccccctaaaattcagaaaatcgacttaatattgtatgatctgtaatgtttctgctagagaaagcaggaaagcccacaaagacatgaaaaagacaaaaagaggagatagggaagattctggaataatctactccgtcctcctctgcaattctggctgatgaaacaagcaggcattttatgggtgattgaacttgtgtgttcctaaggcacagggagtgcctttgaaaactcagctcaagtttatagtgcatccccacccagggaggctgagatttcaatctctaataatcatagaacccaaggagccgggggtcaaaatgagccagagcaagggcctgtaattgcttaaaatattttttaaagtcttttttcctacatcccatgttagatctatggaggccccgatttccactctcccagaatagcccaactgtgtacccagagatcacctgagaaccccatgcaggtctccagcactggaaatgagctagcaattcgattcaagaccgacttgtccataaatgggagaggcttcaatgcgtcatggcaagcagtcactggaggtgagtgagaaaaggaggtttcctaaagtacttaagccgagccctcgttaaatttcatgaaatgcttgggaaaacgtatgaaggctacacacttataacttagtgacatcccaaagggcagcctactgagacctgacatatacccttccctaaaatacgtgataaagtttaacttcctaagggtcaccacatatgtgaaagcaagaatgtaagtgtgtaagtccatggtgagagcagaactagggtgataggccagacccactctccaagggctcgtacctcttaaccagcctccatacctcatgccatagtacagacctttagattcttggcaaatatcaaacttgcaaacattaaatttgtgaatcccaaggaattactgtgtgttctatggtgactttctgcccaagattttaggcagtctaaataaattgcctattgtatatttttaaactatagcaaaaatctatggcacaaaatagtgtaacagatgttagcatatgcaactactagagatagccacatttgcagaatgcttactgtgtactaggcacttttctaactattttatgaggattatctctagtccttacaaccaccctgtgagggaagtccgcttcatatcctcatcttaccagtgtggacactgaagcttagaaaggttagtgtcttgcccaaagttccacagctagaaaacgtcaaagcacatatgtgattccagactaccttatggccacacttcttcaactctatcataaccaaggtatctatataagagctctcccctaaagttaattatgtaggaatttaaataaacacacacacacacacagacacacacatttagtgtttagattacccctgaatgattctccattattagaaaatagtgccaaagttttctattattggcttatattatcataaatccaagaaatggtgggtcatagagaagacattgaactaacaggtatttgataacatcaaaggaattttaaaaaacctaagtaactgtactatatccgaatattaaatttttaaagggtagatattaaattatttttaaatgcatgcactactagattatcacaattcttggaaggaaacatgttattcttccagtatgctatatttttagaggacagtgaagaagcagcattccatggctttgtgaaaacgtgatttcatttgcgtttccttttaattatttttaaaataaattttggcatctgtatttaaagtgtttgaagtattttcttagtatcatccatgtcatcccttcttattctgttgggataaatggcttaatgtggatatcaaattcttcagtgtttttagcatcgactaactgattcaagcaaagtaatgtattgatctatacaaccaggtaatggattattttcgagcatccatgattcctctcatgaaataattgtgttccccacttccaggttgtggtgggattttccaggctcccagtggagagattcattctccaaattaccccagtccttataggagcaacacagactgttcttgggtcattcgggttgacagaaatcatcgtgttctcttgaacttcactgactttgatcttgaaccacaagactcttgtattatggtaagtgacataaatttcaagcattgtctccagtcaaacctcggtcaaaacactgccatataagcatatttagtgaatgtattacttatgggtgtttttaatgtcgattcataggaaaccaaactattggcaacttaaaatataaggacatttattttttacctaaaaacaaatcaggaagtagataatctctaggttttttagcaagtcagtttctgcgctaccattattagcctgttggcttttcattttgttgttacttcattgtcaaaaaatggctgcagtggtttttatctgaatgtcctacctgagtctacctctgaaaaaaggaagaagcaatagtgttaactatttctgttttgtttgtgtttcttttaataaggaaagcaaattttccaaaaaagcccctgatatatcattagccagaactgactacaaaagagatccagaaagtatcatggaatagatttatcataaatgttttagatcaattattattattaagcatctgggattttcacaggattctgcttctcttgagacaaggatatcttgatttgctacttgaacaaatccatgttctgatagaacaggttgggagatgggagtggaggagaaggaatatggctatgaattggtcagatgacaaaaagagtttctgctactgagatgggagggtttccttgactcctttacaggacttgcgaagggggtggcttatttgcttggctgcctcgctgaattcaggagggagcacacgaatagacgaatgcaggaaccggggtgaacgaaccctagaactggctggtccctcatctctggtgggagcaggctctgtgcacggcccacggcagcgtccaagcttgttacaatgctcttttagctctgccatctcggagagggtgtctgcgaccccaaaagccccaaagggcatgtgttgcaatcagtgctcttttagcatttgccgtccatggacagctaagtgttaaccagctcagtggagggtcagggtgacagccttttacaccctgacctcttggtacccaagttcttgtccagtgtccaggaagaatcaggtcacacgaacaaattgaagggtggtgaatgtggataactttattaagaggtagaagtggctctcagcaggaaggcgagcttgaaagaggttggaggaagtgggttgcaggagtctggccttccttggctgaactcctctctgaccatagtctccgatgtccagctccttcttctcctcttgacgttcagacacttctctcttctgtgtgtgtgtgtgtgtgtgtgtgtctgctgagtctggggcttggagttcttatgggcaccagatgggcgcagggcaggccaaaaggcaacatttgggtgggaaaacagggatggttctcactttgagtggcagatccaggcttgagggtggagcactcaccagggacctcaacctcttctaccaagcattttcctgccttctggcccatcactactaccaacacttttaatgcattcctacctgaaactaatgctttgcgcttcatataagagtgaatgaagttctattttgaagggttttttttttctttctgtttttaaattttttggctacctaattttcttttattattgttattattattatactttaagttctgggatacatgtgtagaagctgcaggtttgttatataggtatacacgtgccatggtggtttgctgcactcatcaacccgtcatctacataaggtatttctcctaatgctatccctcccttagccccccacccctcgacaggcaccggtgtgtgatgttcccctccctgtgtccatgcgttctcattgttcaactcccacttacgagtgagaatatgcggtgtttggttttttgttcctgtgttagtttgctgagaatgatggtttccagcttcatccatgtcccttcaaagtacatgaactcatccttttttatggctacaaagtattccatggtgtataggtgccacattttctttatccagcctatcattgatgcacatttgggttggttccaagtctttgccattgtgaatagtgctgcagtaaacatacgtgtgcatctctctttatagtagaatgatttataatcctttggttatatacccagtaatgggattgctgagtcaaatggtattactggttctagatccttgaggaattgccacattgtcttccacaatggttgaactaatttacactcccaccaacgagtaaaaacgttcctatttctccacatccttgccagcatctgttgtttcctgactttttaataattgccattctaactggcgtgagatggtatctcattgtggttttgatttacatttctctaaggaccagtgatggtgaactttttttttcatatgtttgttggctgcataaatgtcttcttttaagtgtctgttcatatcctttgcccactttttgatgaggttgtttatttttttcttgtaaatttgtttaagtttcttgtagattctggatattagccctttgtcagctggatagattgcaaaaattttctcctattctgtagattgcctgttcactctggtgatagtttcttttgctatgaagaagctctttagtttaattagatcccatttgttaattttggcttttgttaccattgctcttggtgtttaaatcatgaagtctttgcccatgcctatgtcctgaatggtattgcctgggttttcttctagggtttttatgattttaggttttacatttaagtctttaatccatcttgagttaatttttgtataaggtgtaaggaaggggtccaatttcagttttctgcatatggctagccagttttcccaacaccatttattaaatagggaatcctttcctcattgcttgtttttgtcaggtttgttaaagatcagatggttgtagatgtgtggcgttatttctgaggcctttcttctgttccattggtctgtatatctcttttggtaccagtaccatgctgttttggttactgtaggcttgtagtatagtttgaagtcaggtaacgttatgtctccagctttgttctttttgcttaggattgtcttggctgtacaggctctttttttgttccacatgaaatttagagttttttttctaattccgtgaagaaagtcaatggtagcttgatggatatagcattgaatctataaattactttggacattatggccattttcatgatattaattcttcctatccacgagcatggaatgtttttccatttgtttgtgtcctctcttatttccttgagcagtggtttataattctccttgaagagatccttcacatcccttgtaagttgtattcctaggtattttattctctttgtagcaattgtgaatgggagttcactcatgatttggctttctgtttggctattactggtgtataggaatgcttgtgatttttgcacattgattttgtgtcctgagactttgctgaagttgcctctgtctcagcttaagaagattttgggctgcgacgatggggttttctaaatatacaatcatgtcatctgcaacagagacaatttgacttcctctctatttgaatatgctttgtttctttctcttgcctgattgctgtgacctgaacttccaatactatgttgaataggagtggttagagagggcacccttgtcttgttccgggctacctgattttctaacaaaaagtttttcatctttcatttgtgtatatcaacatttcattcaaatacaaaccagattctcttggttactggatctttcaatgttagtgtcctgatagtttcctacacaagatccaactggctagcttctttcaaatttaacccaagaaaactcaaaggtttgtttacatttttccaagtagtccattttaatggtatgatttcaatattattttacaagattaggttattaatgaaagttaagtttatttatcactgtatattaaccatccaaatgagtcttcagagtctaagttggctaagcatcatgcagactgaaagcgtagaacatccagctactctcctgacaaagaccattttgaaattttggatgacatttacaaacatctttctaaaagtagccaatggttcatgaggtagtgtgaagtttctgagtgaatatctgagagaggtgtgagtccagtctttgggaccattttttcctgcagggcctttactgatccacaaaggtttagcagctcttctgagagcctctcaggacaaagaggaccaaagtttgagtccagagctttgttagagtggcagtcttggtaagccattcgtatcttaggtaaaatgaaaggaaaacagccttcactgagactgcattcaatatttgagttacctgagtgaatccccaaaatctgaagccatgaaataatgagagtgaatcttgtatttctcgtgcatctaggcactggacatccagcaaaagcaatttaaaatcttcttcaaagagagatattaacattctagacatcatttctacctataatttttcatgtgtaatagccgattaaataagagagttccctgacctccgttacaggacattcaacaggggtgtgtctcatctgttcaagtgctgcaggttcaaaccccttatgggcagggaaacatgcagacaggggtgcaggagccggggagagtgcttctggactccgggccccatggtagcatctaggggtgggtgcctacaactcccagagccctagtgggcatgctacagtgctcttttagctctgccatcctcagatggcttaagttttaaccagctcagtgtcctcttggtacccatcttcttgtttggtgtccaggaagaatcaggtcacacatggacttgaaggatggtgaatgcaggggttttactggatgatggagacagctcccagtgggatggatggggagctggaaagggggtggaaagggaagatgatcctccccctggagttcactgtcccatggccgatttcttctttgactgaccctggctgaactcctctcaatgttcagatgctccttctcttctctctttctctgctgtactgctcttctgctcctctgctcttctatttatctgctcatctgcttgtctacttttgaagcctgggtttaggggtttatatgaatacaggataagggggtgtggcaggccaaaaggcaaaatttgggtgtggaaacaggaatgcctgttcccatttagggccatgggtttccaggcttgagagtggggcctttgctggggaactgccctcttctacctagtatttccctgtatcctgtgtgtatcaccaacacactatcaaagatagtcatgtacttgaggggacaatataacaaaaatgagatgtaatatgagtaagagacaatagaaacaaatccactaatatgccagatagtaaagttacctggcacacttgctatacaactgtgattactcaactcatggaaataaaagtcaaactgagaactttcagcaaggaactgcatactatagaaagtgacattgcaatatgaagaagacccaactacaaatttgagaactgataaataccatagctaaaattaacacctcagcagaaggctttttggggggactaggcagagatgaagagataaatagtgactacagagaaacagtgaactggaagataagtcaagaatctactcagaaaaaagtatggataaaaaaaggatgaaaaatatataagagaggttaagacacatagaggacactcagaaaatatataacacacacttaattggagtctcacaaggaaaagagagatatatggaacagaagcaaactttgaagagctactgactaaaatttttccaaaactggtggaagtcatcattaaaaaaatagaatctcaaggaacccaaacagcaaagcaggataaatagaatgacgtacttttctaaaaaaaaaataataataacaaagataaagagaaaatgttacagtcagctagaggagtaggtaggtggggaacagattgcttgttagaaagtagagactaaatgctgacttttcaaccaggattggaagtaaaaaaaatttttttaaagacaatagactgatatattcagattaaagaaaaaaaagtaactaccggccaggaactctatgctctcctaaaattcctttaagaatgaaggtgaggatgtgtatggtagatcacacctgtaatttcagcactttgggagcatgaggcaagaggatcacttgagcccaggagtttgagaccagcctgggcaatgtagtgagaccctgtctctacaaaacagttaaaaaattagccaagcatggtggcacagacctgtaatcccagctacttgggaggctgaggtgaaaggatcacttgagggtggaaggcaggagttgcagtgagcacagatcttgccactgcacttcagcctaggcaacaagcaagaccctgtctgttaaaaaaaaaaaaaaaaaggaataaaggtgaaataaatattgaagcaaaagaagggtcttggcctggcgtggtggctcacaactgtaatcccagcactttgggaggcctaggcaggcagatcatgaagtcaggaggtcgagaccatcctggccaacatggtgaaaccccatctctattaaaaatacaaaaactagctgggtgtggtggtgtgtgcttgtaatcccagcgacttgggaggctgaggcatgagaatcgcttgaacccaggaggtggaggttgcagtgagccaagattgcaccactgcactccagcctggcgacacagcgagactccttctcaaaaaaaaaaaaaaaaaaaaaaaaagaaggtctttaagagaagtttgaatgggccagagacaaagctacttatagttttgaccatggtgggtattgctctaccccttgtttcctccctcgtctgcatggtgttcttttctttgatacagtgcagaatccatggaatttaacatacaaagtgtgtcaccaaaccaaagcctaggtcaacagcatgccagcatggctaggattttccctcttgtggtcatgaggagggttttccacctacatgggacataaacacacagacaaggttttctatgaacactgccatatttcagcatgcagctgggcttggcttaacaaagtgcagcaggaggaaacagcaggagtgaaacctcaaatgtgatcgggtcttaggcacggagatggaaaataaactcaaaaacaagtgctgggaggagtttgggctggtaggtaaggcaaaatataaaatgtaataatagtccaaacaagttgtcagaatcagataatgctgtatgaagtacagttgactcttgaacaatgctgggattagggtcattggccccctgcttccctgtcgtgcagtgaaaaatctacatacaactttcaagtcccccaaaacttaactactaatacctatgacggacagaaggcttaccattaacataaacagtcaattaacagatattttatatgttttatatattacatactgtattctttcaacaaagtaagctagagaaaataaaatgctatcaagaaaactgtaaagaagagaaaatatatttactatttattaagtggaagttgatcatcataaaggtcttcatcctcatcatcttcacattgagtgggttggggaggaagagggagggggcgctagtcttgctgtctcaggggtggcagagacggaagaaaatctgtgtttaagtggacccaggcagttcaaacctctgttgttcaagagttaactgtaggccgggcgcggtggctcacgcctgtaatcccagcactttaggaggccgaggcggggggatcacgaggtcaggagatcgagaccatcctggctaacatggtgaaaccccgtctctactaaaaatataaaaagcagccaggcatggcgggaactcgggaggcagagcttgcattgagccaagatcacgccactgcactccagcctgggcgacagagtgagactccctctcaaaaaaaaaaaagagttaattgtagttggaaaatcccagccagtgggcagaagagacattagaagcaaatacctctaagaacccaggcaagacattaaaataagaagtgagccacaccgatagtgtgagtcagcacagtgcttcagctaagaaatctagctctaatatagggtggttctggggctgagcctggactttgtgatattctagctgtgttctttggaagaaagttaacctttcagcttcagtttccttaatggaaatggggataataagaggacctaggtcagatttattgttaggtatttgagataatatagatgacctgcttgctgtcacatagagagttctccacttgtgctagccattatgatgctgctgatggtgagtgttttgggggaggttcatttaatgaggactagaagaagagacagcgcggaatactaggagcagaaatgcacttagaagtcagagtcagacatgcatgcccgtgttcatcgcggcactgtccacgatagcaaaggcatggaatcaacctagatgcccatcaatggtggatgggatgaagaaaacgtgctacgtatacaccagggaatgtgacacagccacaagaatgaacaagaccatgtccttttcagcaacatggatggagctggaggccataatcctaaatgaagtaacacaggaacagaaaactaaatactgcatgttctcactcaggagtgggagctaaacactgagtacatatggacacaaagaagggaacaacaggcgccagggcctacttgaggttggaagctgggaggagggagcaagttgaaaaccacccatcacgttctttgctcattacctgggtgacaaaatagactgtacaccaaacccccatgacaggcaatttacctctatagcaaacctgcacatggacccttgaacctaaggtgaaaggtttttagaaaaagaagtcagggtcaggacttgccgtctgtaattctgggcctcaagctcttaagcagaagagcccactttcgaatcttcctcgtagtatagcacctaggatttagcatatctagggctcagtgctctggaatcattgtgaaaatggccgacatcattcatttgggcctggaagccagggaagcgttcacactggaggcgacatttaagtggcagagtctcgccagtagaaatgcagcagtgaggccacgaggggaggctgcaagggaaggatggggaaatggtgcacgcacatttgggaataaaaaatgagagtgttgtccctggagcgtgaagaaatgccggggagcatgtggagaccaaggggctacagaagacatctgagctctcttctgctccagttaagaatttgaaattatcctataggtagtatggagtcagtgaaaattttctgtaaaacgggaataacatactcagagctgtattctacagtgacaacaggcagcagtgtgtgaagaatggcttggcagagaaaaagaaagatggtagcatgtctgtttgggaagcaatggaaaaagcttggatcagaggtgataaggtctcatagtaggcagtggtcttgggacacatggagagcgcagggacacgtggagaactgtcacggtggcagtcactagaattagaggctaattacatggtggtgggtggggctggtgatagagatggtggggggaagcctatttgcttgaagaatgaatgaatggccgggagtgatggctcatacctgtaattccagcactttgggaggccgagacaggagaattgtttgagctcaggagtttgacaccagcctggaccccatctctgcaaaaaaattaaaaaattagcctggccaagtggcacatacctgtattcccagtaactcaggaggttgaggtgggaggatggcttgagcatgggaggtcgaggctgcggtgagctgtgatcacaccactgtactccagcctgggtgacagcatgaccctgtttcaaaaaaaaaaaaaattgtgaatgatgaggccattaactgagtaaagggagtagatgatagtgagtttgacttgtaaacttttgggtttaaatattatatagtttgacataagagttcagagcttgggataggatctgagctagacatatacaattgaggataatttctgtatattgggtggttattaaagttgtgggagtaggtatgatcacttttaggagtattttaccaagagaaaggggccaagccaactcctggggaaacactgccatgtaacgggtggatgaaagatcagaggagaggaggctgaggaggtgcgctgagtgcttggtggagaaccagaagagagtggtagcattcaaaccacgagggaagctgaatttcaagggtgggtgatcaaaggtatcaaatcccatgcaggatgccaacgagcgtgaggattgcaacaaagcccctggattccgtctttaataacctgcaaggagcaggattgtggcgggtggtggtggaagactcaaggtcacagtggttaggaggtgcaggagcttctgagcttttccccagagttacggaaatgagtggcataaggagaaaatgggcagtaaccaatgggttaaccaaaatcagtggagagttggttttttaaaaaaaatggagaaatataagttgtgtgaagagggcaggtggaaaaagagcagctgaatgtgagagccaggcgaacagtagagaaaatcatgttttcaggacagagacaccaagaagcgccagattggttctatgaatgttgtactttttagaataagaaattgaaacccatggcttggcacaagatttttctgatttataaattcattatgttaaaaattgcataaattgtatacaaactaagtcattttttcttggatgatttataaatcaactttacaaaaagataaggaagttttaaaagaaaacaagactgtccaggtaagttggggtagagatctgctatatatttgccaaatgtgcccacttaaggggacaggaggtctgcagaggtttggaaccagaccaggcaatgccctggcaaggctggaagcttgttagttagttgtccagggattcatgaaggccggagttgaagcaccagccctctatctttacagccagatggacactggacgggaaacgtaccccaaagtccaacatcttacataatatctctgcagtctcagttcatataaagccaatccttcattttggagacattcaagttaatgtcctggtcctgttgcttagacagagttattagcaaagagaaaaatattcagttgccagtgatgctgtcagataatgttggggttcaggagatttttaacagagttcaagtgtactctttaaataccagtgaaaattatgctggaatgggaccagccatcctgttttttcaaaacttctataacaatttgggttgttagaagaagaaatagtaatttagctgtatgttaaatatgatttcacatatgattaactgtcataaacctatagatacatagaatgttaaggttggaagaagaaagcttagagttcgtttgctgttgtcacctaattttttaaaaaaagacattgaggtggaggtggggcagtgcaaaaaataaaaattaattaaaaaataaaaaagatactgagatccagaaatgtcagggtcaaggctaagtagaaattaacagcaggatcagcactaaaacgaaagccttatgcttcctacgaagtgaataagtattttggtaaaatataaaaattgcagttatgtacaggatacggaatggcagactagaaaaatagagggagaaaataaatttagggtcaggctggagccactttgattttttttttttttttgagatggagtttcactcttgttgcccaggctggagtgcaaaggtgtgatctcagctcactgcgacctccacctcccaggttcaagcaattctcctgcctcagcctcccaagtagctgggattacaggcatgtgccaccatgcccggctaatattttgtgtttttagtggagatggggtttcaccatgttggccaggctggttttgaacttctgacctcaggtgatccacccgcctcggcctctgattacaggtgtgaatgctgggattataggcgtgagccaccgtgcccagcccactttcacttctatatctgataagcccagccttcatttgtcaatagaaggaaaagtgttaagaattcaaatatgaaatggaaagtgtccttgctttgaagtcaggaggtcagggtttccttcattactttccccttcggtgccaaatatgtaccagacactgccaggtgcttgtttctggacgtgtaccacccctcaccctcttcatggcttggggttcttagtttgcttatttagaaaatcaggtgcctggggaacagaagcagaaagaagaaaactaaggaagaggattcagttaggagttgcatttgtgggtaagaaaaggaggacaagatggcagatgaaatggccactgagggcccagtgacgtcagtggtggtttcatcctcaaagttgaagtcaacctcaggcagccaccaggcttcacatgatctctgggttacaagactatccccatactcttctgggaatacaatagaaagctcttcttagagtaggcctagtccctataggttccaaattgaggcaagctaagcccacatgtaacagccattactcttggtgtcatggaaacaaaggcaaaattcgccaagtagaagaaacaaatgaacatttaaaaatggaacagtagactgggctcagtggctcacgcctgtaatcccagcactttgggatgccaaggcaggcggatcatgaggtctagagattgagaccatcctggccaacatgatgaaaccccgtctctactaaaaatacaaaaattagctgggttttgtggtgcatacctgtagtcccagctactcgggaggctaaggcaggagaatcacttgaaccccggaggcggaggctgcagtgagctgagatcgtgccactgcactccagcctggcaactgagcaagactccatctaaaaaaaaaaaaatggagcagtaatacacagcctccatcctctttcacagaacccacagcagtagtctttatatcgccaaagcaccaatgtttttgatgcatgaattgttaatagatgcatagctgaataaatgaatttttgtcatctctgctcctgcaatgctcagtgctttggtggaaaatctcagaggacaccattgggaatgtgctgtactgagttcactccctggcattgttattgatatacaatcttcgtgttgtgagccacatgagcacttagataacatcacagaagtgcgttttctagaattgcatgctgctataatgagaaaagggaaaaactggattttttgacttctattgaaattgtgatggcatcgaggggagctaatcaggaagctggacttgcaggcaggtttcaacacatttggtaatatatttgcactttctgctcagtcaccttcaagtgtctggtgtaattaaccttgggctctcctcaatgacacatcaggagcatttcttgctaaggaagctgtgggacccatcggctgggcatggccttgtctggtcagcacacaagtggcttcattacgtttcctttcacgaaggctgagtattaaagtgacctctgactgacagttaaattgcttaattagagcctttcttctaagtcttcgattcatgtagctctgcaagctcttattgatctcctagaaaggctgcttgtagctcagtgtgagagcaggaagaggaaagtccgttcagcagcaccagctggcccctggagattcctgacctctgcttccagcatcctctttgctcagatcattggaatgtctgctttgtgagaatcagcaaggagcagctcaaagcaagccgaccatggtccaggtcctgcctctcatttggaggaaaacacaaacgagggctaacagagcctggtaccaaaaagcaaaagcaaaagcaatatgattagtaacttctgaagctttttgtggctatctaggagaaagaaagaaaagtgtctgatgtgatccggaaaaaaaaaaaattccctgtgctcccacccaaagctgcaatgtctgttgttgttccattattcgacaataaaatgcagggtggaacagggcagatacctaacgcagcatcctcttttgttgtatttttgtaatacaccacccatgatgtgtttccttttaaaacactgatggtttccaaagcagagcaaacagacacaggaataatagaactctgggtttcaaagagatgatggaaacaagtcttctttaaatatttactgttttacaaacaaatccatgacagaaaccagtctctctctctcccctcctcttcctctctccctctcttttcctctctctctcttttcctctctctctctccctgtctttctgtccctctttctttccctcttcctcttgctctctctccctctcttcctctttccccctctctctccctctgtctctccttctctctctctccctgtctctccttctctctctctccctctgtctctccttctctctctctccctctgtctctccttctttctctctccgtctctccttctctctctttctccctccttctcttcttatctttccctttctttgttcctctctctccctctccctttttgtctctttctctctctcctccctgtatctctctctcactctctctttcttccctccctcctttacgccccaccacaggaatttttgtttccatctgatacttgaggatgatctttttcaaacgtttatcttgtgacttgcatttgtattaacatgcttagctactttgcttcctggtgcgggtgtcttattaacaaccaaatgctgagccagtgctttgaatctgcaagatgaaggaagagttgagttgaagccacagctctcaatctgtggacacgggtttggtttggcttggtttccatttcagctcagactctccttaaatgtttatttgtgaaagtaaaacgagcatcttagatttcttctcatgtcaacatttccaggaatctttgagtcagtgctcgcaacaactgcaagtttttagagtttatagtctcttgtaagatgtgaagactgagtgggagagtgtagaacaaagaaataggggtgaacgcatcgtgatatgagatgtggggttgtgaattgaacttagtattgaatttccaaggagcgtaactggaaaaaaatcactgacaaaggaaactgatgcttcctccttcctcagccccaagaagagatgctataatgagtaatattttcatttccttccgcattcacatttatgactgtaacagcttgtataatttcctgagggatttccctccctatcacttaatgtttcctctattttggagaagttcgtattccaaagtggcaattccattagcaggtataccgccatattataacatgtgaaaatacctcatggactctcgatcctcaaaatcactttgcacctccatgtgaattatctctcctgtgccctaaatgtcttattcttcaccacatttttgcaccctgctaagatcaaaggcaatccagggcaggagacctgtgttaccatctggagttaaaaatgtagcaaagcgggactggcacagtggctcatgcctgtaatcccagcactttgaaaggccaaggtgggtggatcatttgaggtcaagagttcaagaccagcctggccaacatggtgagaccctgtctctactaaaaatacgaaatgtagctgggtgtactggtgcatgcctgtaatcccagctactttggaggctgagacatgagaattgcttgaacctgggagacagaggctacagtgagccgagattgcaccactgcactccattctgggcgacagagcgagactctgtctcagaaaaaaaaaaatgtagtaaagcataagggtccaggtgagaaggaggccacactagaccagagaatggcggttggaccagagaaggacaaggaggagctttatatctgaatccaggaatagaatcaagtttatgtggcaacgatagaagttctgggtttatgtattgaccccagacactgtgctctttgttacccattctgctaagtgagccatgctgggaatcccatgcacgttcactggaatggaatgcaggacagatgccaaccacttggaaagccacgggagcccaatataagactttctcaaatgctactgaggatgcttgattgcaggttcagatgcaaaggatgggggactcccaccctatttccagagctgctgtggttttctttcttggagaccgtgaatatctcacttagcttcacagaatcatggtctctcaacattctaactgaatgaatacaacttgatttcaccttttctctaggtttaatcatacttggtcggacgtcagacagatggggtttgtatattggctctgcactgctaagcgtgtgattgggcaagtcatgtatgttttcagagctcagttttccctgctgcaaagtggaactgtaagaatcaaatgtaaacaaatgtatttaagtacctatcagtgtctggttcagataagtatttgctgctattcctaatttttctattacaatgactcctgcttctattactattaacgctatgttaaagatcttaaggaatcttttaaaaaaattttctccctgagcaagatgaaacttagtaaacaagataaaaaatccagtagaaaaaaattcctcacttcctactttccaacaatctcagggaatatattcctgttttttttttttttttagaaataaaaatacagatattactgaggaagctacaattcatttccccctcagtcatgaggggtgcaaacgatgactgacatttcagtcaggtggtcacgagccatttaatcaccccagggttttgattacagcagagaggggcagccgctgaagtgctctgcatcacgtccacgtcaatcacgtggtctttagtgcttaggcaaagcatgcgtgattactggtctttatttcgtgcaatttaaaaatgtatgctcagctttactttagtatgtgatgttacattttagaaagcgcacgctgtgcactgagttgttttgagactgaatggaaggaagacacaaatggaaggcaggggaaatttcagggtgttgtagtggcctaggcaagatgtaatgaggccccacaccaagacaccagagagggacatggatgaagtagagggaaggagccaagcgatacatcggacaaacagatgttagaacatgctgatccactacatgtagcagggatgggggcggttccccaaacggtctggccgttgggtacatgcttccggcatttactgtggcaagaaatgtaggtaagggagaaatgagagggacaggaagagggcttcagtttgagacactgattttcggggtttgtggaacatggaagagatgatgtctacgatacagttgtctatacaagcctagggcttaggggagaggactggggcacagttgtagatattaggcaatgaacagatgctttggagatcttaaaacagaagccacgtccattaaacttgatacattcctggcggcagcaagaggctagattaactggcgttagtagccatctggcttgggtgctgcagtgctgttatatgaatagtgccctttcatgtctgtatgtaatcacttatgcgtccgagtgatgaaacactaaagaacttttaatatagattttatttttaaaccttacatgctcctcatattaaatttgtagaatacagaaaagaagaaataagaaattattgccatccttagtattacaatatagatacaagctattgaaattttggtttatttccctcacaaacacacacatacaaatatatacacgcactcatgtacacacaaacatgcatagttaagataatattatatataattttgtatcttgcctttttcacttcatattatttgaaattttcttaaatagtttctttggctagtcaatgaaatggacgtgctgtaattcagttagccacgctttattattaaccatttggattattaatgggttttttcttttcttgttataacaatgctatgaggagtatctttatatgtgaatcttagtacatttcctattatttcctttatatagcttttcttttctttattgaacactctactatgaaatattttaagtatgtagagaaataccgactatataatgcatacaaagtatataacatacaaaaacttctccctgtccagactggccaaatcttcatattttgccacatttgcttcaagttcttttgttttctcccaaacagaaatgaactgttcaagacacaggtgaagtcccacatgctcctatcattgatcccatgccctgttccccgtcccagaggaaactgctaatgagatttctggtttgtgattcccatgaaggtttttatagttttttcattatatgcatatatccatacacactatgaaatattattttgcatattttaagactttatgtacatcatgtcacacgctacatatccttcttcaacttgctctattcactcattattctgtttttcacattttctgcattgtaatgcatacagatctaatgcattcttttagtcactacacattctattttatatatgcaccacaagtcatttgcccattctcctgttaatgaacatttaagttgcttgcaatatttttccttagcaactttttgtaccgaatattcttgaagcaatatctgtatgtaaccacctaagactttctctagtgtaaacctgcagaagtggaattgctagcttttaacttttctgtatgttaaatttcgttagaaatttatatatgaggccgggcacagtggctcatgcctgtaatcccagcactttgggaggctgaggtggatggattgcttgaggtcaggagttcgaaaatagcctggccaacatggagaaaacctgtccctactacaaatacaaaaaattagctgggcgtggtggtgtgtacctgtaatcccagctgcttgggaggctgaggcaggagaatcacttgaacctggaaggcagaggttgcagtgagcaccactgcactccaacctgggtgacagagtgagactctgtctcaaaaaaaaaaaaaaaagaaaaaaaagaaaagaaaagaaaaaagaaatgtatatatgagaatttctggaacgaaatgagaaaaacttaccttcatacttgtaatcagtttccacaaaactttcaatacattgtcttatttgatctttacaataaccttatgaggctgcaaggggagtttacctaccctcatttttagatgaggtctctgaggtggttactgcaaagagcagtacagcatgtgacttgaatacagcactggacagcctcattcttcggaagcctttgttcttcattccacacccgcagacttaccccagaacttaccagcttaagacaacaacatttacagtttccgtgggtcaggaagccaggtgccactcacctgcatgcttcctggctcactcatgtgaatgtacacagggttcagttccttgcaggctgttggctgaggcctcccttgactccctgccacacaggcctctccacggagtatctcagaacacggcaccttgctcaccagggcaagcaatagagaggacaagagagagtccaacaagacagaaagtgctagcaagagggcaggaaccatcttttctcacctcattatggaggtgacagactatcacttccattgtattctgttaattagaaccaatcacgaggtctatcccatacgccagggaggagattacacagaggcatgaataccaggacgtggggctcactgagagctgggtcagaagttgcctaccaccccccacccctacaatctccagttggaaaattttcacttcttatctctcccactcctacctacccatatttctggacaacccccaccccaccccttggttctcttttcttttttgcctccatagctttctaattccctacttcatttcttacacagcaatttagctcccactttgtctcactttgatactagaggctaacatctatcacatgcttactacatgccagccactctcctaagtattgtatcttttaacttattcttgtgaacagtatgagctatatattcatattaatccaattttgcagattaagaaatttagcaacagatgagaaagcaaagagaagggggcaacttgtccccaacaacataaaataacacctcccctactatactcatgttctgagagcctatgaagatattttcgtcaataaagattgcttttccggccgggcgccatggctcacgcctgtaatcccagcactttgggaggctgaggcgggcggatcacgaggtcaggagatggagaccatcctggctaacacggtgaaaccttgtctctactgaaaatacaaaaaaattagccaggcgtagtggcgggcgcctgtagtcccagctactcaggaggctgaggcaggagaatggcgtgaacccgggaggcggaggttgcagtgagtcgagatcccgccactgcactccagcctgggccacagagcgagactccgtctcaaaaaaaaaaaaaaaaaaaaaaaaagggattgcttttccctctaaaaggaatcctgccaccaacttttaaataatgcaacatgcttttaaataatgcttatttataagacaaaggtgtgtatgagaattaaaaagttccctttgcttggcttctttattttcccacattaccgttctttagaactatgatcacaggcctccagaactagaaatgccaccaggaagggatgttggtctcacacttgaatggttttcctcctgtgtcacttgacatgtgacaaagttgaacacatgttaactttagaaatgatggacatttatgcaaatctcctcaaggtatcgaagcatcaggtatgaaaattaaggccgggcactgtggctcatgcctataatcccagcactttgggaggctgaggtggcaggatcgcttgagccaggagttccacactaggcaatacagcaaaatcccctctctacaaaacatttaaaaattagccaagtgtggtggtgcacacctgtagtcccagctatttgggaggctgaggtgggaggatcccttgagcccaggaggtcaaggctgcagtgagctgtcacaccactgtatgccagcctgggtgacagggtaagaccctgactacaaaaataacaattataatactaattaaaagaaatttcataaatgtttggcttagttctcacttctggctagagctgaggatgtggaggggacttgatagcaccataatatatcatgtgttcagaatactctgggccttggggacgggtccaatgtcctctgcccacattctgcctctgccttctctcaccctgttggtgaagggcccctgggagcggagtgcatgacattggctgtgccctgtggttgggccccttcattctccttcagacctggcatataggaagcctgcccagaaagcagccgagctgacctccgtccccctgtgactaacctcttacccacaattgtgtctactatgtgtttacagcattgaatctatgagggcaaggacagctgtttcttaactcagggttttcctcaaccctagttctcaatttttagagaccagcaactgtcatacatattcatttattcatttgttcatcaaacatttattgcctgtatgtgccaggttctgtactttttaaaaagtctcctatttttatataataaagttaagctttttgtttttgtgggggttttttgtttgttttgttttgagatggagtcttattctgtcacccaggctggagtacagtggcaccatctccactcattgtagcctctgcctcctgggttcaagcaattctcgtgcctcagcctcccaggtagctgggattacaggcacacgtcactacgcctggctaatttttgtatttttaatagagatggggtttcaccatgttggccagactggtctcaaactcctgacctcaggtgatccacctgcctcggtctcccaaagtgctgggattacaggcgtgagccactgcacccggcctcatatgtattttgaatatgtgtgttagtatcttggcattttataaaattctggatattttacaaaaagactggtcaacttttctgtagaaattaaatgaccactccattagatctgcctctgttttaagagcttcggcagttagaattctctgggggacagtggccactttttattttgtggcttcaacttcaaatttttattttattactatcatctagaaatgaattagttgacatgtacaaagttttattttgtttgtatattgccctgacttttaccacttaagtaacgatcagaaaatcaatgctgaggcctagcaaactcttggcagtagacttaagtaagaattatatgttatattaatatatgtgtatccaatagtaatatcatttgctagctttgccttgggaactaaatggaagttaaggtgaaattcatatcgataatttttatgactttagaattgtaaatgaatgggagcaaggtttctcatattttcttccttgaagtgcttttcttgtggaattttataaattgaaactttaaatgtgagttgttttttgtctttttttttttttgagacggagttttgctcttgttgcccaggctggagtgcagtggcactatctcagctcaccacaacctctgcctcctgggttcaagtgattctcctgcctcagcctcctgagtagctgggattacaggcatgtgccactacatctggctaattttgtatttttagtagagatggagcttctccatgctggtcaggctggtcttgaactcccgacttcaggtgatctgcccacctcagcttcccaaagtctgggattacaggcgtgaaccaccacacgaagcctgagaataatgatttgatattataagtgttaaaaacactcaaatgaaagaatttatatttcaaaatctgttaaaaatattctccctccttgatagcctgaggtttcaaaatttcataaaatgacaattaggtacataaaacttaataactataatgctacggtttgaatgtgtcccctccaagttcatgtgctggaagcttaatacctcctctagtgtcaggaggtatggcctttgggtggtgttcaggtactgaaagccttgccatcatgaatggattaatgttgctataaaaagggcttgcaacaacaggttctctctcttctgcacttctgccacttggtgacatgatgttcctccccacaagaggatgcaccattcaaggtaccaccttgaagcagagagacccggctgtaacttgctggcagcttgttcttggacttcccagccttctgaactgttagaaataaatttctgctctttataaatcacctggcctcaggtattctatggtatcacaaagaagcagactgaggtgtgtcatgagcattttaaagagaagtaacatggtaaatctagaatttggagagagaagacgctgctactcactagtgatgtgaacttggatgacttactagcctacattgaatgagacagtagtttaatagcttagcacttgcctccctgtctttatttttatagaaaatcacacaggttaggatgtttgtgatggagcttgtaaaattataacatgctcatcacatttggggtgtcattggtatataatttgaattccgggacacatgaaaaccttctttttattgagatggagtctcactctgtcacccatgatggagtgcagtggtgcaatcgcagctcactgcaacctctgcctcctgggttgaagcaaatctcatgcctcagcctcctgagtagctgggattacaggtgcccaccaccatgcctggctaattgttttttgtatttttagtagagacatggttttgtcatgttggccaggctggtcttgagaaaaccttctatttttgatccattccttgtgaagtattacttcagccagatgaattttagcagaggtcttgtaattccaggacctcaggggctgggggtaggggaaatagctgggaagtctgtaaagcttctaggtgtgcccctttcaaaggacccccaaggaaatgggtgattcgggtgattttctgaagatttcagccttaatattttagtttacttttgttccccttatttcctcttgtcccttgagaggattccaaccactcagactgaaaacaaggactgtgagagggaagaaacaatatgtacttattccttggacctttgaatttcggagaaaatttttttaaaaccagaagagtcttattttgtgagtccatggacttgcaaaatcttagagttttttcttttttttttttttgagaagtctataaacaccatagaacccattgttccactagtttaaaaaattaagaaatgctagacacttaggttgattccatattttggctattgtgactagtgcttcagttaacaaggaaatgcagatatattcaacatacttatttaatttcctttgtctgcttatcccaggagtgagactgttggatcatatggtagctctatttttgattttttgagaaatgtccatactgtttttcataatggctgtatcaatttacattcccatcaatagtgtgtaaaggttcccttttccccacatccacaccagcccttattattttctaattgggattaagtggtatttcactgtggctttgatttggatttcactggtgattagtgatgttgagcattttttcatttacctgttggtcatttgtatgtcttctcttgaagacaaaaagacttatcaatggatgaatggatttttaaaatgtgatatatataaacaatgggatggtacttagcaatagaaatgaacacaatcctgtcatttgtggcatcatggatgagcctgaaggactttatgttcatggaaataagccaggcacagaaagataaatattgcatgatgtcactcatttgtggagtgtaaaaatgctgatctcgcacaagtacagggtagaatagtggttaccagaggctggggacggtagcagggaggaaattatggggagatatttgtcaaagggtatacaattacagttaggtaagaggaataagttctgatgttctataacacagtagggcacccacagtaaacaatattctggtttataaatattatagtgtgttaaaagtaactagaagagaggattcttaatggtctcaccacaaataaatgataaatgtttgaattgatggacatgctgaataccatgatttgataattacacaatgtatatgtgtattgaaacatcacactatccctcatacatgtgttcaattattatgcatcacttaaaaccaaaataaaaaataaatataaactgtatatattcataaaattgaatcttaaacttttataaaaatgaaaaaatgctattctaaacaaataaatgaataaattatcttgagagaagtaaatagtctgtgccttaagattcaattggtgtattctccatactctgtaaccacagatgttctaagaaggtattcattatcctttgatattaaaactaagacagtattaatagaatattactacaagcttaggacactgtatctataaccttaggacagcataaaaccaagtatagagataataaagacttgaattaaaccaatggtggtgatatttgagagtagactcaagtatgaatgtagtaagaggttttgtagtgatggtttaaatgtcattttgtctactgtttacagtgttcaacgtgttcaaaggaaggattcatactagattggaaattataatttgaattggttagaaaaatggaatttagtttttaatcaatctttgttgaatgaaaatcagtcatcaggtttcatttattggagatatatatatatatatttaaattttgaacattaaataataaaaaagaaaagatttgctgctccagaacagacccacatttgttttaaacttattattgtaagagctttagctcctcagaaagttaaaaatcctattgatatttgattcatgggcttgtataagccaaactgagaatatcctgccaatcatacctgtggctaaagagaacatgcagaatcatacctgtgtgctaaacagaacactgattataatcatcaccagatttttaaagtcacttgcgagtaacttccttacattgaatctccgaactttctatttttttccccaagattttcttatgaaatataaatggcaatttgtttttaatgaaatggccatattttaccttcatactttcagtcacattctaatggttggcaggttgatgcatgcgtcctgctcagttgataccttgcagtgaacaagaggaaagggtttcaattctggactctggaatctagtggtctgattcaacgtgacctgctccctcttaggaattgtgtgacttgggcccattacttaggctctctgtgcctctgttgtcctgttcttaaaaacagaaagaaatttgggaggataaaatgggacagtgtacgtgaagggctgaatccagttcctggcacatagtaagcactaatgaatgggagttattattaatcatccaagcaaaggaactcatttcccccctgatttacacataagagtattcaaaaattcatccagacactgagttccaagcaaattagtaagcttcaaattttacaaatcaatacagagatttcaggtatatgtgacatagattccatttcattacatgcctggagggtcagctaggtcccagcatggcactaggcaagacagagaccaacagttaaaaagagagaggtaattttcttttccttttttttttttttttttttttttttttgagacagaatctcgctctctgttgcccaggctggagtgcagtggtgggatctcagctcactgcaacctccgcctcccaggttcaagcaattctcctgcctcagcctcctgagtagctttgactacaggtgcacaccaccacacctggctaatttgtgtattttttattagagacgggggtctcgccatgttggccaggctggtcttgaactcctgacctcaggtgatccacccgcctcagcctcccaaagtgctgggattgtagatgtgagccaccatgcacgggcaaaaagagagagaggtagttttctaaatcagccttatatcacccctatcgtttgaaaagaattctgccatttctcttctcttgagcattaccctatcacgaaacttatgaagaacaaacaggtccaacaaatgttgggattctgacaacaaatgctcatcactcatcattatttctcgtctgttttctcatgtgtctattcttgcattacacatttccagcacatgttgtgggcatggcctgtgaggtgactacactggggttgggaaggaaggggagtgtggaagggacggcatttatgaagatatcaagaaatctaatagtggctctgacagaggaagtcctgctgaaattcacgtcagcatccctagaaatgaccaaagacttgttacagctgtgagaaaggacaataaagccagtttccctagatccagcaaacgtgtgattatccactagtatatcggcgtgcagacagttcgtggaatacaggccttctagatgtgaatctgaaccactgtttgccctgtctcctttcttgtaggcatacgatggcttaagctccacaatgtcccgccttgccaggacgtgtggaagggagcagctggctaaccccatcgtctcctcaggaaacagcctcttcttgagatttcagtctggcccttccagacagaacagaggcttccgagctcaattcaggcaaggcaagtaccctgtggatcttcccaggcacaagagaaatcttcagtgctctgtttggtgcaacagtgaaatgagacctgtgctcagaaattgatcacagccttctacttaacatgtaaaaaattaaatagaacaaaagaactgtgacttacaattatcccaactcctgatgcttgtaaccttctccttctctgacttcctttggacccgcatctctaacaagtttaaaagtgcttttaagactagaaacagtataaaaaagttttatccaaattcactgatctagcactacccaaggctttacactagaatgggatacactgctatcaattacaagacttgcttgtaatgtattcagatgccagcccctggaagcagtggtttccctcatttctgaatcctgccattgtccaactgaggagtcactgttgttttccatttatttttctttctttgttccctcccttcctcccctcttcttccccttcctctcctccccttccttttcctcatctctctttccctccccttccctttctttccacagggtctctctctgtcacccaggctggagtgcagtggtgcaatcacggctcactgaagcctcgacctcccaggctcaggcaatcctcccacctcagcctcctgagtagctgggactataggtgcacccccacgcctggctattttttttcttttttagagatgggatctgctctgttgcccgggctggtctcaaactcctggcctcaagtgattctcctgtcttagcctcccaccatacctggccatttttgttcttaaatcaccacttctccaagacctttttacccattgcctttcatctgctcgttctaagagatgaaccccttatcccatagtcagagatgacttgtattcagatgactcagaacattcactacaaatacatttagtctgtgtagtcattatgtctatcttagtcaactcgcttatattctgtagtaaagagctctggatggggacagtgcctggatcgaggtctcccaaatacgcaccatagacctttagactttggagcaagacagactatattcttgttgattttaaagaaaaactagtttcctaatagttcttttgcatgttattattcacttgtttgttgcttcatagtaaaaagtccctgctagctttcatccggactgtaacaacctcctgaaagtcacctacccttaccccatctctctccaaagtcgcctgtaaaagccctgctctgatcatgccattggaatgctcaatgtctgtcccgtctccacctggcctggagaataaagctcaagctcctgcagatgttaaccaagagccccagaacccaccctgacctctctccagcgtcagtcacccacatccctggggcaccccatgctccagctgagcctctatagatgctcctctgtgtctgctcaggcagtcccctccctggcctcccttttctcaccctccaagtcctagtttagcctcggcctcctcctcagcaagactcctcttacgccctccagcggtgaccgcctctccctcttcaagactcacatcgaattttgctcttctctagtaatctacagtcatccttatgaagccttattcaattgagtatttattttcctgaaaaaaagaggtcatttataagcagattatccctatgcctatgatttatgagtgggcagtgtaagtgaatccatgcaagaattttgtttgaatgacttaggcaattcatagacatttaatctgttgctttttgccacttcctacttcctgtagttgaagaataattgttaaaaatataaactgtgctcctgttttctcatggtttatgtacagctctccttatggagaactttcttggcgtgcattttagaaataagaagaaaaatcattgatggttttattcatcaaataattgttttgtacggtcagtagaaatgaaaagcatatgacatgtatgtgtgtttgtgtgttccccagcctgcggaggccacatcctcaccagctcatttgatactgtttcctctccacggttccctgccaattatccaaacaatcagaactgcagctggatcattcaagcgcaacctccatgtaagtaacaaaaatgaaaaagaaaaggcacacaggagagaaggtgtctgtgggaaggtcagtctatgagtaaccttcttatctcagtgctaacaatcgatggccttcctcttcatcttttgcaagtcccaattcctgatgtgcttaagaacaagcatttcctaatctgatagggaagtcatttctacagttgcttctaaatttaaaaacaatttcttttttttcatgtcaaggcctagcaaaggttaaaaaacacacacacgcacaacaacacaacacacctacaaccttgctgtattaacaggcgtatgcaggcgtatgagattgggggtaaaccaaaataatcgataaatagtttttgacatgtgtgccttgagtatagctgatgttcaagacagttgctgagtgaacaaatgaagaagagtcacagactggagaatcagtgactcacgggccagaatgcaatgcgcgcacctatccatcaaagcaaacattcataaaacctgggctctcctgcaaggtactattccagcacaggcctagaagaaacattgaataaacgcttactttcttttcttttttggaaccctagaatcttattttctgacctggtaacagtccgatggtaaggacttctgtcctcattttacagacagagaacatcaggaaatgcccctcaaggacatgacagaatggctgcaaagcgggtgatgctggggcccttctgaatcctgtttcagaggagccctgccctcctttgaggtttgcaggaaaatacagtttcaggcataatgtaggaaagtctttaagttcttcactctgcacagtaattaatcgcctgtgtgaaaatagggaagtcacttaagctaatcaggccatgaaaaagtaatctgcaaaatgaagagtttggcttaaatattctctagcactttcccctgggatgtcaggagttaacaaattgctagtatcttcattgacatgcataagatgtggcagccgatgatgtcatccttagccaattcaaacggggaggtggagccccaaagaaagttgccagccagccagaaactgagctgtagataaagaagccccctcccttgaactgagaagtttgtgcctgaggattattttctaatgagttgtaaagcatttagatgaaagatctcactggttcaagaacagcaataggaaaagatcctattctgaagattagggagcttaaagaacaacaaaaagaaaatgtatccaggtgcttgctgttctgcaagtaattcaaaactttcttgataaatgtctctgaaccttagggcactagctctagcctgaaaataaaactgagtgagctaaaatgtgggctccagggagaaaagaatgccttatttacaagcacatgcaaagaatccgaatttaaggaaatgagtctattgagaaaaatgcttctgcgaggaacacagcaatggtgatataaaaactggaaagacggcattttccaacaagatattcccttatagtgcctggaatgaacctacccaggagtcctcttatttaccactgccagtgtttcagatgccacaggcagtttcaaaagcatctattccgttactcttcaaaggaaaccatctattctattactcttcaaaggaaaccatctaggatagaagttgtccccttcccttgctttatcccttcaaccatgtgcaaatccgcctcattcattacttctctgctggagaacccttacatgaaattaccagaagtaaaatttatctccctgtatgttttttaattttaattttattttgtaaaaaaattttattgttaatttttgtgggtacatagtagatgtatatatgtatggggtacatgagatgttttgatacaggcatgcaatgtgaaataatcccatcatggaaatggggtatccatcccttcaagcatttatcctttgtgttacaaataatccaattctactcttttaattatttttaaatgtacaataagttattatcgactacaattaccctgttgtgctatcaaacaggtcttactcattccttctattttttatagtcattaaccatccccacctccccgtcttgccccatctccctgtatgttttatttgccagtactttacgagagagtcttctcttttttcttccagtaaatcatatcaccctctcttttacccactttgaacttgaaagaagcacaacgtgtgcacgtgactttgtagaaattttggatggcggccacgaagacgcgcccctccgaggtacctcagcgttcactcatctacatctgtggtcttggctgtgctttatttatagatccgcatatttataggctgccattctaggttgcaatgtttccaataaatagaaagagcagcctaagccaaataaagatgattagagggtaagaaagcaggcttgaatgtggggttcagggaactcagcctgtttattaatatattcaaacgtgtgaatagtttgtgtatatgttttaaaacatttaaaaattgcagctgctttaaagaatagtggaatgcaacccatcccagcattaggtagcattctatcagaaatttcttgttaatatttgaccaagttcttacattcacatggagtatgtttctttcagccttgtccttagtggaagcgaaaaaaaaagcacttaattagataattaattaattaattccattaaaaatctgtctttttgtttgttagacatcccaataaaattaaagagtgccgctatctagtttctgaaatgctctcaggcaaaacaaacaaacacacacacactacacacacacacacacacacacacacacaccaggccatttaagctttctccgtaaatttcctaacttttgaattttgttgtaaaaacttctcatcctgcactagaagacaaggtctgtcagagaggagactgtttggcctgttgcctaattcccagtgcccaggacagtgtctgagacaatagtgaacaatcaatgaactctccacaccctatgcacacctctcacagcatttgttagtaagcatttgaccaaggataagggtatattatttaacaagctgttacatagcaataccttgcgctgagtactgttctcagtatgttataaatagtaggtcaatccttgtaatcttatgagataggtttcattattttcaatatgcccctttttccaagtgaggaaactgaggcaccaagcacgtaagtcacttgcctaggatcacacaactagcaaatggctgagccaggggctgaatccaggtagcctggctccagcatccacacttttctgtgctacaaaatagtggatattagtgcatttatttgtatgggtccgactgggctggagatttttgctttaggtacatgtgtcccttggtcatctaagtttttcctctggtcctattgttcttgatcatgtttataaatcacctctcctatatatagctcctatatatagtttattttaaatcatcaggtattgtctcaaacattgaccctgaatgaagtggttctcctagtggcaatttcttcactttgttttggtctcttgtaattcgagtaaagatgtgtttcctagaaacagcggtctctgccatgttgtcattcattctccttgtcattatcttcattatttaggccgttactgtggcaccgacatgccccatcctatcacatccttcagcagcgccctgacgctgagattcgtctctgattctagcatcagtgctgggggtttccacaccacggtcaccgcatcagtgtcgggtaagaaaccctagcacctgactctagcggttaaaagggatgtggtagaaattcttggtttgttattggggactctgaccttcgtagttgggagccagtttcctgagatcacctctgggccaaatcttaccttcttcccaattaagtgatcgtgttgtcaattctagcaataatgaactctggaagtgtggaggattggttggaaatgtagctgtcttttcagctacatgccatgctatcagatgacttggtgttcttttgttgtttttgagatggagtctcacttggtcgcccaggttggagtgcaatggcacggtcttggctcactgcaacctctgcctccccaattcaagcgattctcctgcctcagcctcctgagtagctgggattacaggcacttgccaccacacctggctaatttttgtatttttagtagagacgaggtttcactatgttggccagactggtctcaaactcctgacctcgtgatccaccagcctcggcctcccaaagtggtgggattacaggtgtgagccacctcgctcaccctggtgttctttttggcttgtttgttaaggcagccctaacctggggaggagaggaacgaggagctacccaggactgggtttcttagcctcttagcccagagagtgctgttggtcactgccatcttccttgtttttagtggttaaaagctacagaacacctagaagattggtgtgtgcatttcggtgctctactgagagggaaagcaagcatgctgcgttgggttctaggccagggttgaatagaatcctggtcacaaaagccaagtggctgtaggatggtaaacaagtcttttattcttcaaagttaccgttcacaggaagaaacggctttgagaaaagacattgcagaaattccttctaatccaccacactgcatggcccttggtcttcagtttgcagaattgttcccttattttatatgacatgaatgttttaaaatgtgagatggaaatactatctattcttttacattgataatggctctagcgttctttctcctttattttatagtgtctgatgcagtctttgctctgatactcactttatttctattttcttccagcttgtggtggaacgttctacatggctgaaggcatcttcaacagccctggctacccagacatttatccccctaatgtggaatgtgtctggaacatcgtcagttcccctggcaaccggctccagctgtcttttatgtaaatccttttttatggtgtattgtttcagtgctaatgaatctgtaggaaagaagttctggtgctaataggatgggcaactcatagtgtacgtgaaatttaggaagtatttttccaaatttcctctgtttcagtcatagtttgagttataaatagcatgaagtttctctcgaccatggttcttgggtcctgtctaacatttccaaaagtacattcttgagtccttggtgaatgaatgaatctgtggcgcattcatgttcagagtacaggaatcttatctttttttttggaattagacacattaaggttcttccagggaatcactagtattgtttattccagcagagccctcccatctcaattaagcattctttacgcttttatcttatccctacctcaatccacctttccttctatttctgtcagaagaatggttctggggctgggtgtagtggctcatgcctgtaatcccgcactttgggaggccaaggcgggtggatcacttgagatcaagagttcgagaccagcccggccaacatgacgaaaccccgtctctactaaaaatacaaaaattagccaggagtggtggcgggcacctgtaatcccagctgcttgggaggctgaggcaggagaatgccctgaacctgggaggtggaggttgtggtgcactgagattgagccactgcactccagcttgggcaacagagtgagactccatcttaaaaaaaaaaaaaaaaaaaaaaaggaatggttttggaagtttttttaacttccaaacttaaacttacttaaactttaaacttaattttttagaacactttcatattcctcattgcactataacactttttgaaatggactataaatatggaattagtagtaggatcctatcacattctgagtggtcttagattaaattagacagcaacaataatatgtcctagagtagatgtaaaaagcacacattttaatcaactgatagagaggtatatgtgacacgtcacactgataatggatgcttattatatattgagagataagatcctggaatttaaattgccgttttgaattgaaatttatttaccagtctattttacatattactaggctgtggttgggattgctaattctgttttgaagcgaatataagtaacttatggttgagagaagaggattgttttgaggaccctgtcctgtttatttaaaagtcttacttttcttccaagacttgctaatctgtgcatcaggaactgattaaaaatatgggacaactatcctatttgtggaccaagttcaaacatctcaagttgctttttttaatccatcaatcagacagagcctcttcagggtataagtggccttgtgttaaaacaaagacaccctctgcatgccgaaaggcaatgcaagtttaagctgcctcacaggaaggaggttttggtttgtctttttttttttttttttttttttggagacacagtctggctctgttgcccaggctggagtgcaatggagtgacctcagctcactgaaacgtcgcctccggggtttaagctattctcctgcctcagcctcctgagtagctaggattacaggcacatgccaccatcccaggctagtttttatatttttagtagtgatggagtttcaccatgttggccaagctggtctcgaactcccaacttcaagtaattcacccaccttggcctcccaaagtgctgggattacaggcatgagccaccgtgcctggcctggtttgtctttgtcttcactaagagcacagcgttctggatgggaagaaatctatatactttataatgtttaccagacatatatttattctttcactcaacagatatttattaagctcctaatatgtgctaggcatgtagttggcacatgctactctcctatgaggtgccttctatatattgatcaataaaacaccatcattgtccttagaataaaatccaaagcccttcgcacagctttagtaggcctatcagaattgccaaataaaatgatttttttttttggtcttttcctgtttgtctctaccacattcacattgttgactgctctcattcagtggttgccaggaactgagctaggtgttcaagacagataagatttcaggtcttgacaaattactcataagccaacattaagaagctatttaattaaattcattttatttctgtgggataataataacaagtttctataaacaaatttatagtaatttcaaatttctaggactgtgaaggttaaagaagatgtcaaatttaaaacgcataccacacagctagtgcatagcaaatgtttggtgacttaattctctcaatctttaccatttctgaagtatcttctgtgatagctcacaaataaatccaaacgggcagcactaggctctccttccagaggatgggagattacacacacagaaagcaagtttcatctatttcagtgcttaatagacattacattttaattaccatatagaacatcgtaatgactcagctatttcctttctcgcctgtaagaagttaattttgattcctctgagttacttgcttgagttttatttttaaaatggacgttttaggctgcaagatgcctctttttttgcagttgattaatgagaaggcaaggcctgtgagttatttctgccctggtctaaattctatccagatggatgcttggaaacattaccctggggtgtgtgagagcgtatgagaagcatgtgtatcacatcaagttctaaaacatggggctgggattgtggtgaaactgagtagggaagaagactggagaaattatggttgaatctgcaacaaaaaggaacggggagaaataaaacctaaaaaggagttttttgtaagacatatatttaaccatttattacccataatatgaccaaaaatgtgaatatggtaaattgttttcttctgcttctcagaaagcagaaagggaagaaagggagatcattttcctcagaaggtaaattacatgcagttgtctctaaaatctttctattcaaagtgcagtgcaatctttctgaccagttacttcacccctgcggtttggtgggcagggaattgacagaaattgtattttatacttgcagagtgcttttagaaagtgataggtctcagttcaagaatcagaatgagataataagaaacagtgattgtactatttttgttccacatcctacatttactaacagatctaagccaaagggtgtagttgcttataaaatgtaccagcctaaagcaaagacttccaagcataataaagctttttttatagtttaatttaatccttctaggtatttgcctaccaccatgtccaacggaatgtcttttctgccatctagcactggattgcagtagtcaagtacttagaaaagaccttcactttgtaatcttctggagcatcggacagaatgctaatgtgcatgttgatcatctaggatcttgctgaaattcactttctcactgagttggttggtggggccagattccttgtttcaaacaagctctccggtgatgccgatgttgctggattatgcactttgcatagaaagattttagaggcaacttcgtgtaatttacgttctgaggaaaatgatctccctttcttccctttctgctttctgagaagcagaagaaaacaattttgcgtatttcacattgttgatcatattatgagtaataaaattgagcctgaatgtatacacaaaagttggcagccatcccaaagatggatttagaccaattccttgcaaaataaaaaaaagattgaagatagaaatattgtgttataaatcatcagattgtcaaaggagacaaatatgtggtttgttttgtctgatgtggatatatcctgatttcaattatcagttatagcttgctgtgaaaattccatctagtctagtccagatggtctatactgtagtgacccaccttggtgggattctgagagccaccagcttaccaccaggcttactgatttggttagagacctaccaatgctagtatctggcttgagagctaggttagagcagagctgaccagttacttcacccctgtggtctggtaggcagggagtgaccagagatgtgcctggtatattgattagtggtagggcttgaggtggtcagagcctccaggctggttatctctaactattctcctccattagctgagatagagccccaggggagcactatacttagcataaagtaaaatcttgccatggataatgttgagcattaacagaaagatacacatgacagagaagtacatttttcctttcctttccccttccccttccccttgccttccgttcccctcccttcccttcccttcctttcccttccccttccccttcccccttcccttccttttcccttcccttcccttccttttcccttcccttcccttccctttttcctttaccctttcccctttcctgtttgttcatgctttcatttcattggggtataaacctagaagtgaaattgctggttcatatgataatactatgtttaactttttgaggaaccaccaaacttttttatagggatggactattttacattcccgttagtaatgcgtaagagttctaatttctccatatcctcatcagcacttcttattttctatttttaaataatagtcttcctggtggtttgtagtgttatctctttgtggttttgatttgcatttctctaatgactaataatgtttgaaaatcttttcatgtttttattggccattcataaatcttctttggagaaatgtgtattcggtttgttttccattttaattgggttatttgtttttaattttcgagttgcaggagttattttatattcaggatactaccttggtcatgtgtttttattttctttgggtatatatttaggggtggaatttctgggcattaattggatgtacatttaattttatgagaaactcccaaataattattcaaagtggctatgtcagtatgcagtcccacgaggaatatataagacttcagttgctttgcacgcttgtcaacaattgatcttgtcagccttttaattttagcccttatgatgggtgtggaatgatatctgactgtggtatttaagttgcattgctctgatgactaatcatgcagagtacttttcacattcttggtagccattttcttgtcttcttttatgaatatctgttcaagccctttgtccacttttaatttggttgttttttcattatctgtaggaattccttttatatttcaactttgagtcccttgctagataaatgctttacgattatctcccatttccccaccccggtctgtaacttgccttttcatttttttaaatatatatatattttctggacagagtctcactctgttgcataggctggagtgagtggcacgatcacccctcacttcagcctctatctcccaggcttaagccatcttcctgcctcagcctcccaagtagctgggattataggcacaggccaccacacatagctacattttattttttgtagagagggggtttcactgtgttgctcaggctggtctcaaactcctgggttcaagtgatcctcccacctcagcctcccaaagtgctgagattatggttgtgagctaccacacgcagcctattcattttcttattcatgtctttaatgaaatgtttatttatgaattcaaatttattaattttttatcttgtggttagtgctttttgcattctatgtaagaaatatttgcccatcccaaggtcacaaagatttttctccgtgttttcttctaggatctttatgtttctagcctttatatttacatccttgagaaatattaagttagtttctgtgtacgaagataggcagaggtagaggttctttttttcctctctctccataaggatatccgttattgcatcaccatttgttaaaatgagttttccccttgatttgtcttggcaccatggattgaattggattgacagtgtatttgtgggtccccttctggaaattctttcctattccattcatccatttgtctacccttacaccaataccactttatcttgagtagctcatgtttttaagcagtaaggccaagttttgaaagtactcaactagcacctacatgttccagactctttagatatgttacctatgaacatcatatgaggtagatactatttcctatcctcgactccccaacacatcgtagttgcagaatataagacaagttgaataggtcacattcaagcaccagcgggtgttgttacaaatcccataattttgctgcctctccagaaattaagtacatacacctttgcagcgcatttaagtgccacctaaatgatcccatcatattgccccagttacatgttttaatggtttctttttttttattatttaccttcagccaacccacaccatgtcttagaggtactcagtgttttaaacaaaccaggtatctcgtggttttctgaatatgtcccgcccttctctgcacatgtgccttggtggcatgcttctttgcccaccatctatagtgcttacatccagctcacatgtatatttccatctcaaaaagtcttcccatcaagctattgcagagcaccacaatcaaatatgatgcctctgctttgcaattcttaaacgccactttataactctgatggcactcacactattctgccttatatattttttttctgtattctcgtccagttttgcccactaggaagaaaactccttgatggaagtgtattcgtcgtctttgtagctattggatacacatttcaacaagtccgagtgaaagaaattttttgagacagccaaataatgttgtgatcaaagttaaagaaagtttaaaaaagtgaacgggttaacctagcatgtgatccgggagaatcccaaagtctattctctcaatttaatccctttaaatatttttttccccaaatcagatctttccagttggaagactctcaggactgcagcagagattttgtggagatccgtgaaggaaatgccacgggtcacttggtgggacgatactgtggaaactccttccctctcaattattcttccatcgttggacataccctgtgggtcagatttatctcagatggttctggcagcggcacgggcttccaggccacatttatgaagagtaagttgtttctattttagtgatagcttccagaatatgtcttacaaactagaaataataattttctcagtaatatattaagcaagaacaatcctaaactctacactattttcctacattgtctttgtgaattaccttataacatattagaaaaactgaattgcatatgaatggctcaataagggcaagggagagcactctcaatggttctattgttctttttaagctctaatttctacctaatgttaaattagtttttttcatgacgttgtgttagagtctggtaatatattatagtttgggtttggtgtatttatatcaagtgtgtttcatttgatttcataaactctacgttcttcacatttaagacatttagtattactttgggattggcttaagtgctcacatataacaacaataggggattcttctaatagtataaaatgttaaatatttttattctctagctcaacttttccattattggctatttcatatgtaatttcaaactatcagtttttcttgtaaatttctttaaatgttccattcttttgaaaaacaaagtaaaatagataaaccaaaattagagagtggggctgctcaccccaccttcccatgtccccaagtcccctaggggctcagaaccccttttcacatgggaagttgtggcctcttttcacaccatgcaacgttttaaggaccttttctaaggaagtgatagcccagaaaccaaaaaggaggcagtatttctttccctagtcagaaaagaaatcacagtcaattaaaagtccatccttttcaacaccctttgccttttgtttttttcatttgattaaagagcaattctaagtgggtctgatttactactctgtcttccctcctagtatttggcaatgataatattgtgggaactcatgggaaagtcgcctctcctttctggcctgaaaactacccacataactccaattaccaatggacagtaaatgtgaatgcatctcacgttgtccatggtagaatcttggagatggacatagaagaaatacaaaactgctattatgacaaattaagggtgagtttccacatgcaatcaatgttcataaatattggtgaattgctattggtaaaaataaatccaaggtaacgtctattcaagcatttgcaaatcatgtgggatagtctgctctaaatcatgtttagagcagactgcctctagattacatggacaaaggcaatttcagtattgtatttattattttccatttcatatctaaggggttttttaggattattataattttcctgttgagctttgtctaagcatgcatgtatgtcctaaataagtatttattctgtcttatttcctactatcctctttgtttttatgttagagtattaaaaattttaatgatcatataaaaataaatataaatataaaaatcatggtgatcattgctatccagacattggctaccatatcagttccagaaacacaatcggatgcttacaggctatgaccccaccttattcatcttggattcttggtcatgaatagatcccagtgcctgatgggtgcccaatatgtatgggaatgactattacataatttgtttggtagagtattttataataactgttcatatgaatttgtcctgagctatttaaaaattatcacagaatatgcctcaaaataggtaatttgagattttaaaaccaaaggtaggagatttactaagtgctttgaacatggtgagccctacaagttttggctattttgttgtcattaattcttctttccttctgtggaaatatggactcctttaggatacctgtccactttctctcattaaagcttttctcttcttgttattttcccttctttcttcctaattcctccctttgaagccccaaagcacatttattaagtactgttggtaggcaaccatcctggttcctatttttccatccacaaattttactgtaaatcatcttatgagtgattcccacagtgcatgtttattaatataattctgcaacaaagatgcaaatgttttcaaaacattaaattaccttcaataatattttatattctctggcagtatgtgttttaagctaaaattaaatgtttactcatttgtcatttttttgttatgataacattgtaataatataaggcatcttttttattttatctttttatgaagaaaaatatagataatacaatgctctattatctgtttttatgtacagatctatgatgggcctagcattcacgcccgcctaattggagcttactgtggtacccagactgaatctttcagctccactggaaattctttgacatttcatttttactccgactcttcaatctcagggaagggattccttctggagtggtttgcagtggatgcacctgatggtgttttacctaccattgctccaggtgtgtttggtaataaatgaagttctttttaggactgatatgtgcaggccaatgtttcaaaggatcctatcataacaggggtcagatataaaaataagtacagccccaaagcccttccaccatatgttcagatgttgttttaaattcataaacactaccttttgtagaaattgtacgtttctttctaaaaaatgcaggtcccattatattttttatattaattaggggcttgatatccataagatcgtctacttacaatttctagagaccactttagaaatccctgaaaatttgatttgcagatactacacatgtacattcacacacacacacaatcagttagttaaggatcaactcataaaagtaactatttttcctctgcattttatttcaaatgtagcttcagaaatgcttcagtttctccttagctggttgtaaatttccatgtttcaaagtaaaatgggccgaattttaaacttttattttacttttttacattcctaatcccctcagtgaaagtgatattgagctagcattgtttggggagacttttttcttgaaaaatttttaaatgagaccgggtgcggtggctgatgcctgtaatcccagcatttttggaggcagaggtagacggatcacttgtggtcgggagttcgagactagcctggccaacatggcaaaaccccatctctactaaaaatacaaaaattagctgggcgtggtggagcgcgtctgtagcctcagctactcgggaggctgagacatgagaattgcctgaaccaggaggcagagtagagtttgtagtgagccgagaacatgccactgcgctccagcctgggcgacagagtgagactccgtttcgaaaagaaaagaaaagcaatttatttaaatgaatttgagcgtttcttatggatttcaggattgacatagaagaaattaatcagatatttcttggaggatattctaagtccttgaatgcttgattggaacacagaatcacggtatctcattgaagaatattcgaactctgaacttgttctatgacttaaaagattagcctatttgcttctaacttcttatatcagcagaagtcactaatgaagataatttgtacttatatttatttaatgtcccttagtattccattctgaaatgttgttcctacctctctaataaggtgctttcatgacactgaatacaaatctcttacttaaaatattgatctgtctatctaagagcaaagaaccatcagcaagactgacaaatgcaatttagaggcaacatttaaatctggatggatatatccagagctcttagaaataaacttgagttaagctttcttttatatttacaaccctcaaggtagaaaaggaattatttacttgtgtaaaatattataccaacaaattttcttctaatattttattacgaaatttcataattatatgatgtaagtggacaggtgaagaagagagccataaaccttatttttcttagtcaagaagaaaaagaaaaaaggaaagtaaggggtcaagagaattttagagtttactaattatctagatggcataagtgattatcctgtaatgataccacactgtgaaagtgtcattaaaacttaaaaaaccttaatattttgaaatatgtcaacttattgagcattgtcctatcagtatttctttctttttttttttctttttttttttttttttgagatggagtctcgctctgtcgcccaggctggagtgcagtggcacaatctcggctctctgcaagctccgcctcccgagttcataccattctcctgcctcagcctcccaagtagctaggactacaggtgcccaccaccacacctggctgatttttttgtatttttagtacagatggggtttcaccgtgttaggcaggatggtctcgatctcctgacctcatgatctgcccacctcggcctcccaaagtgctagaattacaggcgtgagccactgcatccgtcctgtcctatcagcatttcttatacacacatatatttattttaaatcaacgcatatttattgagaatttattatggatacactgagaagactaagaaaggaaaatgaggtacaatctctactctccaggagcttaaaagtaatgggaaccaggcacagtggctcatgcctataatcccagcactttgggaggctgaggcaggagggttgcttgaagcccaggagtttgagaccagcctgggcaacagagggagaccccatctctacaaaagattaaaaaaattaggtaggcatggtggtgcatgcctgtagtcccagctactcaggaggcagaggcaggggaatcacttgagcctacatgctgccagtgagcagtgatcatgacactgcactccagtgagaccctgtcctaaaaataaatacataaatagtaaaaataaataataaataaaagagattgggaaagaaaaaacactcatatgtgagttaagtaatggtatcgtaattaaatgggtacatgacaaagcaaatggtaacagtagcaaataagcaagggaagaaaaatgagcttactgtggactagggtcaactgaaggaaattcaatgtgtcaagtaggaaaagcagtcagtgtgtcagtcaggaaaagctcagccatatggcggtaacaaacaatttcaaactcttaggtgctgaaaacaacaggtctccttctacatgttcctctcgtgttaactgggtgcctctcatcatccatcacttcctaactcaggctgttggagctgccattgtctgcgatattgcctgagaccatggcagtaggcaaaagagcccttggatgtctcggtttaaaagtgctcactgtaaagtaacacatgccttttgctcatagttcattggccaaaactggtcaaatggcctctctcagccacttgcagaatgcagttctaccatgtgtttggaagtggagacaaaggaaatatttggcaaacagcactaatgacccacagtcattataaccatattttacaaattcaagataagaaatatttcacatagaggaaaaccttaaaatttgaagatactggataacattcagcattcagattttccatgtgaaattgctttaaaaaaatctgtagcctacatagtaatagggtaaagaaatcaggacctagttctacaacattttatattcacttcctgttggccctgataagattcaaacatattatggtgtacaagttgtaaacttctgaaatggtgaagattggatctctgaaatatattgctacataaaagtgatggcaaaaataattgttaaaatcaactttttgagaactctggaaatagaccaaagccttatagcaatctgcggcatatttattcaagaaaaatcactgaatctaagtaagagtcatttttgtggcattctcttcctattcccatctctctctctcctcctagctttgtagtagcctcatgaccacagtagctgtgaaaatgagcagctttaacagctgtgggtggtggggccgcagaggtccagaaaacagcgcatctcctcagcattgccattattccagttcagcaacttcctggaaaactgcattctcaggtcttgtcttcacaggacctgggcaagagctcactcttttgtaaacagccctgtccctggggtctttgccgaaaacaatcagcaacagctgtttcacatcacaaccgtgcaaggcagtgacaccagttacagctaatgagaaactgaccagtaaacttgaaaggaaaaaatggggaaggagatgcccactggggctttgaaaagctccgacatgtttctggaaatctagaaggccacacacatagcccagctgtgcacatgcccaaaaatagaccccgagaaggacctaatctgtcaactcaaaattgcctagatataaattacaaaagtaactacgcaaaaatgataaagaaacatgagaaacacaggaatgaatacagttctacctcagtaatacaggggatcctctacgtgtctttattgatgcctaaatagtcagcacttgatattaaatgggttatatagcaaaattatggtgaaaatggagaacacaatgcattttttttacatcaaagatcaattgcggaaattgcagctttccgaatcagtgggttacatacgatattcattgatttctctgagaaattgtttcaattggttgcttcttttcagtagagggctgtcactttcaagtgaaaaagtgctagctagcgtcttttccattagggctgtgtcaaagatgttgctttctattctacaggtgcttgtggtggcttcctgaggacgggagatgcacccgtgtttctcttctccccgggctggcctgacagttacagtaatagagtggactgtacgtggctcatccaggctcccgactctaccgtggaactcaacattctttccctggacattgaatctcaccgaacgtgtgcctatgatagccttgtgatacgagatggtgagaacattataaagaatgctgagtttcaaccctgacacataattagttctagtccattatcatcagacttgcatactgcctccatccgtttggtttggaattacacagatattatggtcaaggaaggcatcagtaccagaaatggctacaacttctgaaggacatagaaagtattaaattaccggtcacagaatatcaggaatagcacatttctataaggaaaaaaggcttttttagaggcttaagaaggaaagaatagtctgaatgtcaacattgttcacctgtcctattgagatacctctgagataaatattgatattttatgtttctggctgaaaaaaatacttataattgtaatgtgactggacatagtggttcacaccataatcccagcactttgggaggtcgaggagaaggatcacttgagtccaagagttccagaccagcctgggcagcagaatgagaccctgtctctaaaataataataagaagaatataaaatagtaatgtattcatttctctttgtcccctgaatgtgggtagaataggtagagttaaggggtgatattgttgtattctttcctttgtacacaggcatggtgttgctatgtgacataaagttagagacataaatattgctgatgtatgccttatacaaaattgggcttcacagtctgcatggactggaatgaaggaggacagcagaaaggccacatcctccacgtcagtatttctcagtgtggcccccagatccacagcatcatttgttagatgtacatgttctcagcaaaaagaaacgtgtttgtctttggcccacaggttgctagtgtgcaagatcttgtctcccttatccctgatccctagacccctgccgagtgagaaaaatcgaatggtgaaggtgctttatgtcccttctgtagaggcagaacactaagtagagactcaaatcaatcatacacacatgatgagatgtcaaagcatgacactccccctttttcccatcagcaatcggctatcagcacgttgcacagaggagtatcaaagcaccagaatgccctcttcacatctaagccttcctgtgcatactgaaatttaaaacttttcatgtaatggaaaggatgtgcatccttgcacacatattctagtgttcagaacctactagaagttttaaaaaatatctttgaaaaaaatcttaagtaggtaactgcatctatgaagtaaattatggttattcttttaaaatcacattccattgagttgtttttgttccatcactaacttctcttggaagcagagagtctggggagcagtccttttttcctgtgtggctttgcacaggtcacaaagtggctccaaacccgttctacctgtgagatagacaaatacctccctcacaggctttttctgaggattaaggaaagtaataaatgaaatctttttagcaaaagtacaagcattttgtagatgatgaatttggaatagtttagatttcagtttacttagatggaaatttctaagagaggtttaatcagtgcccttgctcaggcacagggcggcttgaaagagctaaagaaactcaggtgcgtgccaaaacaacacaaatgttttaaagtggttatgcggcctttccgtatggattcctttttatgcactggcaatgtgagtagatgctcaataaggttccttccttcctcatttgtttaattatttattcaagaaatagttattgagtgcctggtctgtgtcagttggtgagtattgtagtcatttacacattgttaatatatttttatgactaaatttgatgtttttttttttttgagacggagtctcactcttttgtccaggccggactgcagtggcgctatcttggctcactgcaaactctgcctcccgggttcatgccattctcctgcctcagcctccctaatagctgggactataggcacccgccaccgcactcagctaattttttttttttttgtatttttagtagaggtggggtttcactgtgttaaccaggatggtcttgatctcctgacctcgtgatctgcccaccttggcctcccaaagtgctgtgattacaggtgtgagccaccacacctggcctatgactaaattttaaatcccacttcaattatttgttctttgcccagccagccttttgcttctgagtagcagaagcatgtaacattctgaagcaaatatctaaagccaactggccacagacaaagatacttataggctattcctgctcatgcaattggcctgtcatcacaggcctttggccgtatggaggctgtgaaccttcctgggctaccccagagagggtcatgcagcattcttgggagaactgagtcactgtcccacctgcttattcattttatagagttgccatggttcaaaatgaatcagtttcttccagaccacgcatctacccattctgtataccaaagatccctccaaactgagagtccatgaaactacattggtcctagcaaaacttttaaatagaaaagaaattgtataaaaaaatcagtaatcctttaatctagttccagatcttaagtgtactttcttcatgaccttagataaatcatttaatagcatggttttggggcatctgaggttaatctgcaaaggttaacatcactgttaacttctatctctatgcccttgcatacagcaaagtggcttgtaactcctgtaagattcagttcctcatatacaaaatggggataaaaataaatgcccacctaatagtgtcactgtgaacataaaatcagatagtacatgtgaagcacttaaaggggtatatactaattgctcaataaatgtcagtcttgaataatcttggggcctcagtgtctatatctgtaaattgaagaggttggactagagaaagaattgccaagttgccttctagtgctagcctttactgttctttgacttcccctcctctttaaagattaggctcaagattaggctcaatctttctgcaatctatatgttgaggttttggaaggctccagaaataccccagtactcagtatgaagactgaaggggtggatgggcaagtaacaaaccatctgtgatttttgggtcatcttcccactaatgagtaggctaatcaacaagcacttattttgagataagcattgtttcaccagatgatctggagtgaattttagaaaagaaatcaaaatcaatagactcaactcactttcatccagtgataaaatatacacgtgaactaataacatataataaacttcaaaattttgtagtacaggtaatcagagaataagtcaacaaaaaataatattgggtgaaatgtgtagcaaaatagcataatgaagtgcacttactataaatgcaaaagaactataagagatacacttttgaattataaagaatgcaaaagtttccagcgatcagaaaccctccaaagaatgccattttgagcattttgtatttataactctgccattacatttgtaatcacaagaatagaaaataacttattttctaaagtggttaataatgaatgagtttcaagttgtagtcagtgccacaaagaatccatgtggctggttgtataaaagggcatatttactcatgtctcatattctatttttgttttttataaactcgagatttattaattctctgccttaggacaaaagagaaaaaaacaacatattttcccagccacggcatccaagtctgctataatcccctttgctccattttggtttcagccggcacaggggctttgatcaaagcttatatccaagataatcaagatgaaaggagacgtgtggtgcccctgctgtcctttgtgtctctgtgggggtggggcacagttgctggaactcttctctcaccctccacacaaatgtgtggttgtttttataccaaaacaaacaaaagcaatgaacaaacacagatgaaaagttttgtttaaaaaaaccccactggcactgaagaaagggcacatacaattgcataccttttggtgaatgatattgtaacattagtgtaggatctgaggtcaaagagccaactgttttttttttttcttttacctacttgaccttcagcaatcagagtaactgaggtcagagtctctaatcgacagacatatcatcactgggtctccatcgcttcccaatcccaggtactctgattttgagttttagtgacagggagaactggcagccagtttttagaaagacggtggaaactgtcaaagacgtctttatcaaaaagggtaaagaacccagcactttgggaggctgaggagggcggatcacttgagatgaggagttcaagaccagcctggccaacatggtaaaacccctgcctctactaaaaatacaataattagtcagaagtggtggttcacccctataaaaccagctactcaggaggctgaggcaggagaatcacttgaaccccagaggcagaggctgcattaaaccgagactgtgccactgcactccagcctgcgcaacagaggaagactccatctcaaaaaaaaaaaaaaaggggggggtggggtggggtgggggtaaagaaaagggcaggaagcaccattgcaagctggagccagaatgatatcacccctgaggggtccttctttttgaggatcccattatctcctacgagtcctgatgttctgagaaaaatgtgtgagctgctttggctaagctgcaaatgattgtagagtagattctcaagatgtattttcatgttgttccctttctttcaacgtaggagataataacttggcccagcagctagcagttctctgtggcagagagatccctgggcccatccggtctactggagagtacatgttcatccgcttcacctcggactccagtgtaaccagggcaggcttcaatgcatcctttcacaagagtaatgagttcaaatattttttaatcccatgttatctcatctcctctcttttcctctctctttctctcttcctaatataatgtttttgggcaccaggacacaagacaagtcagaggacatgggtctctgcccaggctctggatggctggctccccttacatcagtgctgagtcctcatccaaagcactggggccaagtcgtacaaaagtgtgctgccttcaggtctctggtgtggcatcttcgctccaaaggaggtgtgtccagggaatgcatgagagagagctttaaagcaatttttcagcctagctgagggctggaactagatagagcacagctcatatccataactcatcgaaggagcaaaacgtcatcatttattctcataaattacttggttgaagtcagccatctgagggttggcaggaagagtttgttgctcttgaaatatgaatttgatgagtcaaaagcgggcaccatatatgggataccatcatgcacagtatgattgagacttttcaaacttgacatgtgaagtccagtaacagccttaaatccaaactaactgaaaggtgataaagtagtccaaggaagagtgaaagactctcatgttttgatcaaaaaacataattttaaagtagattctcaatctaacattaaaaattaatctaatatttcctccatgcttatatataccttttataaagtagggagcaactgaagataagttgtgttcctcacgctcaagggaggcaggctgcatagtggcttaagagcatgggctttggaactagacctaagatacattttcacctctacaatttaactagctgtgtgagatgtctgcccttactgatgagcttctggtccctgacaactggagaattaatgcctcctccttttatcctcttcctttatctcctgccctctcactctcatgtatatattactatgtatcgcaactcattatacatacatacatgtatacacatgtatgtatatagtaagggtggaaccattggaattaatatgtgtgtttatatatgtatataatatatataaatatgtgtgtgtgtctatgtatatatacatacttggcagctcccggtctagaatgtatttcaaatttaacctgtgagtggtataatggactttggagactcagaagtggggaggatgggtggggtatgagggataaaaaactacatattaggtgtaatgtatactagtcagggaaccagtgcactaaaatatagacttcaccagtatgcaattcatccatgtaacgaaaaaccacttgtatcccaattagactagatagatagatagatagatagatagatagatagaaaaaaaaatttcacctttgaaagttgaacactttattcccacccttttccatgccaccaccccccaattctacactcctcataatctcagcaaatggaaagtacatttttctcattatttaagtcaaaatcttgatgttatttttgacttttctgtttgtctcacacttaaccatcaacaaatcacactggctctaccctcacaatgtatctagattccaaccacgcctctccatttctgttgctaccagcctagcccgtgcacctatcatctctccttggcctcaggcggtcccctccttattggacactctgctcctgtccttccctgtcctccaccccttacagtctaaggactgcacatagagtgacattttcaaacttaagtgagatcatgccattctgatgcccaaaacccttcaacatcttcctcttcttattcagaataagtcttttcagtttcctgcatgacctagccatgctacctttggaatctctcattctgcctcatccattctgacttccatgatgtacctctaacacatcaagcctttacactgttttctgaactggaatgttttctcccccataactatctggcttgatccttcatttcattcatgtctctgctaagatgttactccaatgacgtggcttttctaacttaactctaacaataaagtacccttctccctcctctcatccatttttctttatagaatttatcaccatctcacatatcatgtatttgtttattgtatgtcttccccatctataaagaaatctttatgaaagcaggtaatttgtcttgtttacttacctctgtatcccagatctcaatgaccaccacaaactgagtagccaatagcatgtgctcaatacatgcttgttatgataatcatttcctgcactctggctttattttcaagcatttttattgcctccactttgaaaaccccccaagaaaactaagaaagcataaaaatccagttgccaatgctatttaaataaccgacctttgtttctttgtgggaaggctgcggtggatatttgcatgcagacagagggatcatcacgtcccccaagtatccagagacttacccatccaacctcaactgttcttggcacgtcctggtccaaagtggcctgaccattgctgtccattttgaacagcctttccagattccaaatggagattcttcttgcaaccagggggattacttggtggtaggtcttgctgctaccctttctaattacattttccatagacttcattcagaaaacaaaatgataatttttctctcctgggacataaatggataagaattgcgtactccttcttttgcaatgtaaaggagttgatgaaattttaatttgtctttccagctaagaaatggtcctgatatctgttctccacccttgggaccccctggaggaaatggtcatttttgtggcagtcatgcttcatcaactctgttcacctcggataatcaaatgtttgttcagtttatttctgatcacagtaatgaagggcaaggatttaaaatcaaatatgaggcaaagagtttaggtaagtattttcactgagaattatatctgcttttcctgcaattgcttgatcttctttgatataaaattttcttttctgaaccaacagtaatagaattaataagaatgcctactctcaagtacttattatatttgatacattcaatatctcatcgtgactacttttcaagtaaagtatcattatttccattttaaagataaataaaatgaggcttggacttttccaaggccacatacctaattagtgaccaaagtgaaattttccatgagtataaaataaactattcttcttgatccctggaattccttagacctttccattataagatgtctaattgtaagttaattctagttacagaaacattataagacttacatttgccttattttgtaataatttgtatgctgttttcaaaagaacacataattttttgattctattattactgatttaattatatattacatgatatctgtaattgcttgtacttaattacacttgattataattgcatttaattctactgtaatgatttgattttgatgacatttgctttttagtaatgtttaattgaataaataaataaataaataggcatcacttcaaaaaaagggagtaatgtcagtagaaagtaatataataataaatttttcctttgtcccaccagaagttagataatatagatttcaaaatgatcctatgacttgaatcccagattcatatatatatatatgtaaatgaaatcatatgttttattgcacattgtatgagatttaaagtcaacatggtttctttattttggtaaaagagatgaataagagtcttcaccaactgacacacaaaaataagcaaatagcttgagtaaggtccagaacaccagggaaggagctttggtcacttcccagagctctggcacaaggagggagctttaatgcagctctgtgggcacccgcgccattgctttctaagctgggaccttctcatccctccatctcttgatgctgagctttgcagctgagtcatgaatgggcagttttcacctggtaccaaagcatttcaagagtagcagtgtcctgagtctagtgagtagacgtcagcccatcctacccatcctacataactctactcttttgtttttgtttataatagactcagtcttttttttctttcttgagacagggtctctctgtcgcccaggctagagtacagcggcatgatctcagcctactgcaacctctgcctcccaggctcaagtgatttcctgacccagcctccctagtagctgggattataggcatgcaccatcatgcccagctaatttttgtacttttggtaaacatgggatttcaccatgttgcccaggctggtcttgaattcctgagctcaggtgagccacctgccttggcttcccaaagtgctaggattactggagtaagccaccgtcctcagccaatagactcagtttgatttatatttttaaagtcaacatttagtggtaattcagatacactaagagatacactaagggtgtgtttgacattgcacctcttctattcctttgtggattcactgttcatgcaagtatggttatggccattactttctccctgtctttcttgaagcttattatgactgctgttaacatcagacttaaaagtcttttgatttcacaacctgttcttggcaacctgaaacaacagcatcactgttatttctctctacttaccaactcaagattgttccataactatagccagccttctacttcccacgtctatctggctatcttcccaccatatctatttccatgccactcccacttctcagcctttaacctaggtccttttgtgaacattttttgacatcaaatcacctagttttataccatttttctccagagacactccttcgctatggttgattgagatttctaggaccctgtggtagatgccttttattctcacctgattaataggcctgttaattaattagtcaaacatttacaaggtgtttcacatcatgcaaaccaccgagttctgccaaggagttcacagtgtggtaaaggagacagacaagcaaaggcacaattagaacatgatataaggctgggcacggtggttcacgcctgtaatcccagcactttgagaagccaaggcaggaggatcacttgagcttaggagtttgagaccaacctgggcaacatagaaagaccttagttttcaaagtagctgaacatggtggcgcacttctgtggtttcagctgctcagtaagctgagttgggaggatcacttgagcccgggaagttgaggctgcagtgagccacgatcataccactgcactccagcctgagtgacaaagcgagaccctgtctcaaaggaaaaaaaaaaaaaaagaacatggtatatggtataataagtgctagaaagaggaatgcacagaacagaaacacctacttcagcccaggacatcagagagggttccaggggaagtggatgaagagatttgcccatcagtgataaaaagatgtgaatgcatagaaaatctcaatgttacaagtcatattcaataatttgaaagaattcactactgctagagatcagagtcaaaaagagataaacataatagtgatgaagcaggcaggaatcactctgctcagggccctggatgccaccctcagttagttaagatgttaatcaaaaggttatgggaggcattggaagtttttgctccaaagcctgaacagcgtgatcagattaaaaacactaatgtagctgcaacactgaaaacattggagatggggaaggctgaagagagagagaccagatgaaagagtaatttagggaaaaaatttactccctgaactaaggcaatggcagtaagaaggtaggagagagggcatatcaaagatattataaatacaggattgagtgaatttggcggtcagttggatgtgaggcaggagggaagggatgggaggagccttaggagcagttgttaggtttttggctgggtggatccattcttcccacagacatttatcaagaactttccatgggacagacactgtatcaggccccggggatgtggcagtaaacaaacaaaatccatgtcctcatggaacctaattctagtgttaagatgcagacaataaataagtaaaatatataatatgccatatggtgaaaggtatcaaggagaaaaataaggcagtaagagtggatgcagagtgtccataggaagaggggctgatgctgtcatcagcagactcaggtatggagctctggatgacgagcaaatgagaatgttcatttgagacaagttcagtttgaaatctctgaattacctccattggagatgcccagtaagtggtcggaacaggaatctcgaggtcagaacagggatctagactgaatctgtaaatacggaataatcaacagactgcttatcatttaagtcatgaggatgtatgacagcaattggggaattattcagagtgagatgaaaggcctacaggaggattcctgagggcctccagcaatgtcagggaagccctggagagatgcgcccaagggccagaggaagaatgacatgaagagtaaaaggaggagaagagcttggtgtcagaagccaagggacaaaaatgtaaagaagaacagtgtgatcaactgtgttaaatgctgtggatataaaataagaatttaaaaagttctttgggcatataactgtgaggtgacttgggagaacatgagtgctttcatagggttgaagaaggaagggcaaaaagagagaaggagagagacagacagacagatagggagagagagattaaatagggcaagatcctggaggagacagtaggatgggaacttgatccagagatacaggaagttaatgtacagagggaaaaatagagtgtagagatgcagattaatttattgaggatagtaataaattaggggtaacaaatggaagagattctcatctgatttcttctactttctttgtaaagtggagcctaatgtaatgtgcttagaatcaagaggaaatggggaaagtcaagggcttagggagtaaagttccaaacagccattgtagtttatatgaaaagtaatgggtgaattgcttggctgtgttgagatgggagaacatatatttgcaggggcatcaatttccatgaatgaatggcttgaattgaacacaaccacggagttggtattttgcaagggaagtttgaaggaaagacacgaagcgagggagttggagctcatcaaagggatttgcaatttagagtttcagagatgggggagttggaagtatgacagaattcaggatgtgactgtaagtggatgagtgacagtggacacaaatgttctagagttgagcagatcaagtatgtgtatggctaagtgattggacaggttaatttcattggcattgtaagtacttttactcctatctggtttgtttgttgaaaatgccaaagaatatttattgataatagaaaaatattttttgataatgctttggttttttagaaaagaaatattaaaaagctcctttatcctctggcataacattactaataaattatttcattccattgatcttggttctcaaatgcatctaaatcctgaagaaatctaatgaatgaatgctccccgagttgtgcaaagatatatctgcttagtcttttaaatataccaagatcatagctctgcatcattctgctgtactgaatgctcagtgggaagctgtaactgctagcatacttacatgcttatcgaagtggtggatatttattcatgcttctgtgatgttctgccccgtgcaccatgtgccataatcatttggttggctttaagaaagaatgaaatttccaatgagaatagataaatggtctggcaaaataaaaagtgtcacacctcgtagctccctcgatagcaaattgagaatttgtttgctggaaaagaaaatgaggatcataacagatgaaaggaaatggagacaaaatacagagaagtcgactttaaaagatgatttgtggccattgactgcatccccttcaccagatcatagactgatttaagtgtgtttgctcacagcctgtgggggcaacgtctacatccatgatgctgattctgctgggtatgtgacctcccccaaccaccctcataattatcccccgcacgctgattgcatttggatcttagcggctccaccggaaacacgcatacagctgcaatttgaagatcgattcgatattgaagtaacacccaagtatgtcacttccattttcatttttttcctaccccaagttagtattttttaaccgtcatgtctcaaaacagtccatttctttcagtagcacatactgcaaggaaatctaggggaaaagggaaatgcttaatggctcaggcctgaaaacacagtcggccagccactctcccatcagctgagccggttatgtacgtggatactgtcccttgtgaccctagacacttcctgcaagggacactgagggtggctacttgagattgatgttatccattcttcctcccacaggaaatatatcatgtttctgatagatgaatatttatttgaccagcctcatattcggtgtcacaaatgataaaatgtctgtttaacaaatgggaatttgtgtggtgtgtcaccaggggtcagcactgtcggaacagtactaaagcatgcacagtataatttctcagtctttatttaataagagttctgaaaggattacaaaacagtaagtcttactatgttgaagagaaagaaaaactatattgatcgtagaaaacatttttctctttccttgaacaaaagtatgtatacatttgcatgaatgcagctgtggtgcaaaacttggatataagatcttctgttgctatttctggcactgggtctaatactacttttccactcatggagcattaattggctaatgtgacttcctgaagaaacgttagatacatgcttatctacttttatggacacagaaaattccagttgggacgctccattagtcccaattacagagctgttagagaatttatctttgtcctgtgaaatgtatcaagtcattgtgtggaacaaaatatttgttgttttttgaaattcctagggactaatttgaaagcaacatttatgtttgtaaaaccaatacagaatatggaagggaagtaaatattcttgaatgtagaacatgtaaaacctgtcttttgagctactaataaaagaatgtattattaggaaaaatatcatacagcattttaaagtgacatggcttatgctgattctatcatagttttttatgctaagaaatgatgatttaataatatcttcaaagaaagtaagtaaggttgtcattatcaaaataagcatctgaccatgtaaatttaacagaattttgttcccacttcagctgtacttccaactaccttgagttgcgggatggagtggattcggatgcaccaatactttccaaattttgtgggacatctttgcccagcagtcagtggtcctcaggagaggttatgtatttgagatttcgatctgacaacagccccacacatgtgggattcaaggccaagtattctataggtaataatttttttaaaacttttattttaggttcaggggtacatgtgcagatttgttatataggtaaattcgtgtttgggggtttgttgtagagattatttcatcagccaggtactatgcctagtacctaatagttattttttctgctcttctcccttctcccaccctccaccctatcaaatgaaagaaaattccgtgctcatggataggaagaatcaatattattaaaatggccatactgctccccaaaatttacagattcaatgggattcctatcaaactattatgacattctttgcagaactagaaaaaactattttaaaactcatatggaccccaaaaagaacccaaatagccaaggcaatcctaaacaaaaagaacaaagctaggggcatcacaatacctgacttgaaactatactacagggctacagtaaccaaaacagcatggtactggtacaaaaatagacacatagaccaatagaatggagtagagagctcagaaatacggtctcacacctacaggcatctgatcttcaacaaagctgacaaaagcaagcaatagggaaaagattccctatccaataaatgatgctgggagaactggccagcagtatacagaagattgaaactgtaccccttccttatatcatatacaaaaattaattcaagatggagtaaagacttaactgtaaaacacgaaactataaaaaccctgggaaacatttttatattaaataagagttattatagaatgaatatgttaaaacttttttaaaaaccatgactttttaaaaataagtctatttgcctaattttaaaaatattttaatgctagaaataagtaaggagtgtaaatgtttgaaactacagtcattaatcaactttaatttctcttttaattttcattttaaaaagtaatcttagtaaacttaaatattttatattttctctaacttatttgtgaagaaatatatgtggttaaatcaaactcctgtttcttcagcttactatgaaatacagtagttctctcttatccatggtttcatgttccatggtttcaatgcccttggtaaacagaggcccaaaaataggtgagtacagtacaccaagatattttgagagaccacatttacataacttttctaacagtatactattatgattcttctattttattattagttattgttgttaatctcttatgtctaatttatacagcaaactttatcataggtccatatatagagaaaaaaacagtctatatgtctgtatagggtttggtactatctgaggctttaggcactcactgggggtcttggaatgtatcccccaaggaaaaggaagaaatgcagtatgtttattactttaagtaataaaaccatttaagaaccaggtaactctatttagcacagtgtctttgaattcctcatcaaatataaaataattaaccttttttttctctgagtctctagtgccaaatcagtcactggataaaaagcaaacatgtcagtggggcatggtggctcatgcttgtaatcctagcactttgggaggctaaggcaggtggatcacgaggtcaggagttcaagaccagcctggccaagatggtgaaaccctgtctccactaaaaatacaaaaattagccaggcatggtggtgggcacctgtaattcctactactcaggaggctgaggcagagaattgcttgaacccaggaggcggaggttgcagtgagccgagattgcgccactgcactctaggctgggtgacagagcaagactctgtctcaaaaaaaaaaaaaagaaagaaaaagaaaagaaaaaaagaaagcaaatatgcctcttcagcattttgatttccttatttaaaaaatgagcggttgaagattcactataatatggtcacaatagcacataatttggtatctaataggtttagacacaaaccaaacaaatatttaataccgcgaaagttcagaaagcctagtggtaacaatgtttaactacaccatagatcgtgttatatcctgagtcaagctgcatataattcaattagctatcacacccagctaataagacataattgaatagtaattttcaaggccctgagatatcagttactgtagtgaactgtttagttgagagtaaaactaggaatggcaggtgtccccacagtaccccttccagctgagcttgggttcagtctttaggatcaacacagggtactaggcaggccagatcagcctatcagttggttcttgagatgaaacttacttgcgactattagctcttacatagtgtcccaaaagaattaatgtgacattacagaatattccatttagtcatcatcttctgtttcccattattgtattggacttgtggtatcatttctgtttacatcaacagtagaattcaaataatgaggaaagcactaaccgttttcagaatttttaaaacttcaattcagagtcacttggcacctaaaagttttcaaatgtgctggtgaaatgaagaaaacaaaatttgtaatagaatcaatctttcttgcttgcttgctttcttatttatttatttatttttattttttgcagctcagtgtgggggaagagtaccagggcaaagtggtgttgttgaaagcattggacatccaacacttccatacagagacaacttattctgtgagtggcatctccaggggctctctggacactatctcaccatctcttttgaagactttaaccttcagaattcttctggctgtgaaaaagacttcgtggagatctgggacaatcatacctctggttagtaaaatatatctgctctcttttgggtgtttattttcacatgtacttattcagcctctgaagtttcttcacttccaagaaaggcaaaagcacatctatactctgcagagaagtgcagactaatgagctttgggcagtactggtgattctctccctcaattctaccattaacaatggatgcccagagcccaggtgtcatatagcccaccctggaggccacttggggagagcaacggtagtgggaaggcacctcttgctgctgagacatcccattgccacatgccgttatttgaggggtgttctatagcttgagatggggaagggatcatgcatgtctcctagtggtagcataaggcagatacttgtcactgttgtctcagatcattttttcaaccaaatgagcaagccttcctcattgtgctgagatatccttcccctaattggttgcatttttttcacttcttcatgtatttgaatatgttcatttttattcatgttttcctgttgtcttgacagagattaacgtttcttcataggcagggtcttgttttttattattttctttgtacacacaggacaccttgaatagagggtaaaggaaatcaatcacttggacatgtatatttaattatttgtctctcacaggaaacatcttgggcagatactgtggaaacaccattcctgacagcatagacacttctagcaatactgctgtggtcaggtttgtcacagacggctctgtgactgcctcaggattcagactgcgatttgaatccagtatggaaggtgagttcattgattcattcaacacaacattgagcacctgcattggacagacactatgctaggcaccagtgttaaaatatttgaaaaacaaaacaaaacatgacccctattttcttggaccttaatcagaaattcacagtgataaatgaaaaattacagctgtgatcaatgctataagggaaaataactagtatcacgagagagataataagaggatgagagttatactgtaatgcccaccttaagagagtcctgtagttactcagaatttgtcttactgcaaacccaacaaactcaaatgaaataaagatcttgttcagaaaaactgggtacttaacattaactttctgattttcctcttttttttttttttgtgaacatggggtcttgccttgacctcccaaagtgttggggttacaggtgtgagccaccactgctggccaattttcttgattcttttttttttcttttctgagacagtgtctcgctctgttgtccaggctggagggcagtggcatgatatcagctcactgcaacctctgcctcccgggttcaagcaattcttctgcctcaggctcctgagtagctgagattacaggcgcacgccacgacgcccggctaatttttgtatttttattagagacgggatttcaccatgttggtcaggctggtcttgaactcctggccttgtgatctgcctgcctcagcctcccaaagtgctgcaagtgtgaaccaccatgcctggcccgattttcctgattcttaagttcattacattcattggtctctcatttcttgggccatgatgataactaaattgctgcctgtggactatcacccatggaaggcagggttaaatattaatagagataaaaaatgaatgtatatgttcactaaaatcctcatgcacataaataaatatggagactaattttatctagaaggataatttttaaatacctgaattttgagagctttcttgatggaaggaaacattttgatttgattgaaagttttcttggctttttccccacgtcagagtgtggtggggatcttcagggctctattggaacatttacttctcccaactacccgaacccaaatcctcatggccggatctgcgagtggagaatcactgccccggagggaaggcggatcaccctaatgtttaacaacctgaggctggccacgcatccgtcctgcaacaatgagcatgtgatagtaagtgttccctgccgcctgagatgttatattccatcatttaaagagtttaccgacccataaatcatagtcagaaaactaggtcaggaaaattgccatctatgcaactataactcagacaaattctaagtattgttgaaagaacaaaatcacagtaacctgtcaaaataattgtaaaagttgtttgaagagactatcagctatcactctgtgcatcagggtcatagaataaattttaagagtgaatgatcacgacaaatggcaaaaccggagaggctgtgggaagctaagcctacagcagcacacagctgaatgggaccagagtcacagcacaagccaccacgaaagttctgagcaggtgggtggtcctgcataagcactgctctctccaggggtacagagggactcttggtgggagagcactgctacgtgacctccatgtcaccaacctccagtggtttcacatgtgtcttcagcactctcagcttcctgcagtgaaagaaagcaaatgagatccctgagtgtgaataacaaatagattgttaactgtgaagtgctgtgcacacatatgtgtgtgtagataggaagattggattaatattagtaaatttatccacccaacttgccccttctgcagtgtttgttatctcagtaaataattccaaacttctggttgcttgggtcaaaaatcttgatgtctattttggaatccttcctctcacaccctatatggcatctataagcaagtcccattgggtgtatctttaaaaatatccacaattgaactatttctcatcatatctgctactaatacccccaccgttcacttggattattttagaaagttccacctcgtccccctggttccgttctcctctccctacgttctcaacacagcagcatgtgatggttttaaacctcaatcggatcatgttgctgcctttgaaaatcctctaatggcttctcatctaactcagaggaaaatcccaaattgcacctgtggcccacctggctgacattatctgctgcccctccctcttctacctgtttgtcttatctcaaactcctctcttctttgctctctgggatccagccacctggcctccattccgttccctgaatgtgctgagatgctccccatctggctgttgccttcatctggaatgcccctccccagatggcggcctgctccacaccctcacttcactggggtctctgctcgaatgccttttaatccataaggtctaagtaccttatattacagaccccaccctggcctgacccttctctgccatgttgttttgcagcacttcacacctgctgccatacatcattttgatttgttcatcagtttattgtctgcttcccccactagaatgtgagctccttgaggtcaagccacagtttcattcactgctggggattcactgaatccccagtgcctgtacataatagagataaataattgttgaatgaatggatagtagaggtactatcattatcccttttataacaagccacttttgttttcagtttaatcgtctcctgttgggtagtgaatttcaaaaatatgaaatatctttgtatcttatgaccactttgtattgccgtaaaatgatcttattcaaccttcagattttatttccaagttctaatatctgaaggactgaactgttttctttcagatcttgaaaataagaaaccaagtgtgttttcttttatttgagagccaggaaattttggactaaggttgtttattataaagaaacttttttcctattattgattgaattatataaacaaagatgaagtagaaaaaatactaaccactcccactataccacattttgattcattttctcatctcttcttggcaaagcatactttatgtacttgtaatcatgtgatataaatccacttgaattctgattttaatctatttttctggttataaatataatggatgcttattgagcaatatttggagagttcagaaaataaaaaatataaagatatttttaattctactcatgtattactaaaattttgatgtatgtgctaacagttgttttttacctttgaaattattttcatagtttaaatcatactgaatataatgattatcaggaattttacaagcagagtattcacatgtcctttaggaaagagaatatgaacagtcatagttttagatctcaaataaaagttacagtcacaaccacaaattccaaagcagatcttacttgtcatctccctatcccttaattatcaacttataactcttgcagctactgctggtgggttttatgtcattatttctaaataatattcctattctactactccttgctttttttggacattatctatccacatcctactctagaagatgagacttacccctttgccaccacaaacacacatggggtatgcaatgtttatatactttcccaatcgtctcccaaaatacgtatgtcacgcttttgcttaaattgctgttcagttgacattaccatgattatgtaaacaccattcacaactgagccaagtagtgtagtatggcaacatttgcttttgttttcctaaggaataataataattgggtcctctttacattttcttgggttttatgcattgatcaccaattcgtccacaccctctccaccccagatgtgcatctctaccttctgtagtaaaacatatcagttccatttcttttcctcagtaatatccttccttgagcctttgtacgtcagctgcaagcctgatgctagctgtcatttcagaatttccctttgccatcaaatgtgcaagttccttcattcttctcctgggctagagagctgactttgtgatgctatgcacgtccctttcttggttaatttcctcttttggtgaggcataccctcttgcggctccccaaggaaatgggcaagggcaataaatcttttgaaaaatggtatacctgaaattatctttattttaccataaatctttgaaaagtatatatttaaatattttatatgtttgatatattaatatatatgaatatattaataataattttgaagttttgtgttgctcatttggggtcagttttcttcatgttcctatctcctgtttactaatattggtctctgccttttacattagtcacttccctaaatgtctgctgatccttggctattcattcgtatttaagaatgaattactgaaaggatgactggtatctctgtatgcatgagggggccctgactctttagcaaaacctgcaaacctacaaatgtcatatccacaggtcttttctcttggggaggttaaaactccagcgacgaatcactttcagaattaatttttcttctgagtctttagttctaatgtccacattcctttttttgaaatgtatttttatatgttcaatgtttattttggttcctctttaccctgctccaaacaagggcatgtgggttggcctttgcccctactctatttgattgagaacttgccgaaaagaggaagaagaaagatgaaagaggaagaagaagaaagagaaggagaaggaggaggagaagagggagaagaagaagagggagaagagagggagaaggagaagagggagaaggggaaggagaaaaaaagaagaacaataagaaggagaaggagagaagaagaaaagaagtagaagaaggagaaagagaaggaggaggagaatgagaaggagagggagaaagagaaaagaagaagtaaaagatgaaagaaaaaaaagaaaagagtgaagaagaaagaagatctgctggtgcagaggaggcagctttaactttcattgcactgcttcctagctaataccttatccagctggaatgagcctaaaatttctctaaacccacctgcctatctgactctctgtacagacagagaaaataaaaagctatgccacccagtgtgtcctacaataagacctgtgtctgatgttgtccctgctcatagcagatcctaaatctcacgtgcctgcttcctatccatttgtactctgagagttgtagtttctaagtacaaaagggattagaggacaatgatgggaattgcattctggttgcttctaacagcagaagtccatgtgataaatggatgactataacatgttcagtcattgtgattctatgccaaaggcagactcagaggcaggataacagccattgatcacagtttccgacatgtcccattaaccttatggttggttctaatcccttttgattccatcaatgtggtgcccattcctgttttcagcattatagaaatatttttcctcatctgtttctttatgcattacttaatggtttggaatcagagggatggtttgaatcccagttctattattacatcatctttctggattctggtatcttaatctggaaaacagggatactgttatctgcctgggagggtgttttgttgattagataagacaggctgagtggatgataagcaaagactggcatttttgtctgctcagtaaatgatagcaaactcttcttctggtccagtgagccagaagacactttacaccagaagcccccagagagctaaatttgattaattatagtaaatttaaagagatgacatcttggccgggcgcggtggctcacgcctgtaatcccagcactttgggaggccgaggcgggtggatcatgaggtcaggagatcgagaccatcctggctaacaaggtgaaaccccgtctctactaaaaatacaaaaaaaaattagccgggcgcggtggcgggcacctgtagtcccagctactcgggaggctgaggcaggagaatggcgtgaacccgggaagcggagcttgcagtgagccgagattgcgccactgcagtccgcagtcccgcctgggcgacagagcgagactccgtctcaaaaaaaaaaaaaaaaaaaaagagatgacatcttttgttgtggagtgcattctccttctgcataactgttagtgccatagtctgagtcattatttctaatcttgagtcattcaaatccttttaaaaatgggaatatcaaccattcaatcaatgaattattgttcagttatttcatctagattttttttgaactgtgaaaaccagtcatgcaaattcatttgattttataaagcattggaagaatagtttgcgaattattgtaactatgtgaatgactacagctattatttaatattttagagtcaataataatccattattggaaattcaaataagtaagaaaattgaagctttgaatccataactaatgaggaaagaactattatgtttaattgcagatggagattgatttttcaaattacttttcaaagtatttaaaaatatctgcttgctgggtgctgtggctcacaccagtaatcccagcactttgggaggccaaagcaggtggatcacctgaagtcaggagttcaagaccagcctgaccaacatggtgaaaccccatctctactaaaaatacaaaattagctgggcgtggtggtgcatgcctataatctcagctgcttgggaggctgaggcaggagaactgcttgaacctgggaagtgaaggatacggtgagccaagatcacaccgctgcactccagcctgggcaacaagagcaaaactctgtctcaaaaaataaataaataaaaattaaagtaaataaagaaaaatatctgctttattatgtacatgaaatcatcagaaactgatatttaagcttcccttccaagtaacaaatgtcctgatgcattgttaagaaaaactgcccatcagtgagctctgcagaccacattgtaagcacaatggctcatctcctttacattgagagcacagtttccagttgcaaagtgtatagcagcttttaatctatcaccacatggcaggaaggcattactgcaatactttcattctagtgaaatcaccctgaagtcacaaaatgtgctcggggtaacagtggcttgtggcactgcgatagaaacctgcattgttaggtcattcattttggggcagggttcccataaaaggaagtgggtctgggctggaaatatcacctcctaggaaatatgcagtaagatggattgtgtgcctgaaggttaaactctttttccaacaggtattcaatggcattagaagtaactcaccccagctagagaaactgtgtagtagtgtgaatgtaagcaatgagattaaatcttcaggaaacacaatgaaagtcatttttttcacggatggatccaggccatatggcggcttcactgcttcctatacctccagtgaagatgcaggtaatgtaggatgttgtaaatgccccccattttaatcaggggcactgcagatgcccccatctactgccaatggcagcagagccatccattttccctttagtgatacttgaaatctttgacataagacaaacacacataagcagatgaaaaacgcactgcagacagaaaaaaagctttctgatttcagaaagaaactgccatagtgaatttaaaacttttaatgctattagattagcttctagcacagtttcaggtcatgttaccatgagggttggtgacctgttccgtagtccctggtcaattcttttgtgctgaaagaaaccatctacctcctagagggtaacttagtctcagagagtaattaattttgctggggacagaacaggctttattgtttctagtcatctatccacacacatatttccagtgaaaataaatgggaggtttgatttgatatagaatattccaaaattaagcaagatatggcctctaattataaatatcctcctatttcctgaattgggttcaaaattttaaagggttttaaattttagaagtgggagtgttttaaaatttagaagttttaaaatttagaagtgggagtgaatattaaaagaaaaacgctaagttatttcattggtacaagaagcatctgttcctttattaaaagggggcaaattaatggcaaattaatgtcctattatctgtttgatttaaaataatttattagatcaagtggagaattgctaatcaagccattaggacctgccaccattatatttatgtattcctctaaagtaaatattaatgaacagtaggcctcaatatttggacctattgatacagagccaaacgcccaccacttaatctacagcaacaggaaaatagagaagttgttgatttttgcacatctttcctttataaacttgcagaaacttccataatttgcatgccttttacccataagcttgactgcatctagaaaaacaaatcaaagcagtaatgttgatgttttagttactgttcctgtattgtttatctcttccgttgtggcctgaatcttactactactttctctgttgccttctgttttcttagtgtgtggtgggtctcttccaaatactcctgaaggaaactttacttctcctggctatgacggagtcaggaattactcaagaaacctgaactgcgaatggactctcagcaatccaaatcagggaaattcatccatttccattcactttgaagatttttacctagaaagtcaccaagactgtcaatttgatgtcctcgagtttcgagtgggtgagttctatctaagaatgcgttttcccatttatctacaatattctttttatcttttttgttgttgtcgctgctgttgttgttgttttgagacaggagcttgctctcttgcccggactggagtgcagtggtgtgatcataactcactgcagcctcaacctcccaggctcaggtgatcctcttgcctcagtcccccaagtggcttggactacaggtgtacatcaccacatacaactaattattaaaattttttgtagagatggggtctccctatgttgtccaggctggtctcaaactcctggcctcaagtgatcctccctctttggcctcccaaagtgctggggttacaggcatgagccaccacggctggcctacaatattcttcatatgcttggagactactaacaatgaagggagtcaaatggctctaacataggtacacacgatccaaaagaactctgttcgaagccataattctgtgtgtgcccagctgaggaaaacgaaccccaggaacagtgagtgaggcggatcactgtacaactagactctgtgttacagtcacttcgtttcccggcatgtgacttttgccgaagcgagagtccactactatcaagactcctttccaaggagactgggacttagcatgctcagcatgtgttggcagtttcctgaacttccaggatttatgaaggggctgtgaaattctcctgaggccttaggagttaaaagaagttttgcaatataccagatggagaaacacatggaagctatttggggaaataaccccaaagcagtcatttgtcttggttttcgtgatggaaaaggattgcggtgtactcaataaaccataattctcttaagaatttttaaaactctgtattcaaagaggatgaatcaattttctttctttcccatagtcaaggtgtaggttattcattaggttgcttccatgattatgctgacacgtttttctcagtaaataaacaagtagatagaggaagacaataatattgtaaatagtacgtaatcatccatactgtaaaagttttgctgagttctgtgtaatcccaaaatttaaagaaaaggaggctgaaagcagcagaagctcatcagttagttggtggagaagtccttgggaaactgagaggtcaatgttaattacctttgagaacgtgagcgacagaattttcaggaaggagaatttgatagagcctgtacccacgggccaagggcctcagccagagagtcctccaacctctctgaggctgaagagtctaaaaaggcttataagggaaagggaagttgtggtttgagaatgttctccatggaattctgataaaccctcaccccctctgcctgtttcaaaaccaccggcttgtggtcttaagcagaacagctgtatctcaaatttcagtcagctaaatgctgtcttctctttatttgctcaggtttagaggcagttaaaatactatatatcattgatttagaagaccagtgatgtttatctgacagaataaaaagaaagcagataaatgagagctctgttggtgctctgtacatgttcatcaaacccacgaaatgtaatcttcatgaaaaatattaggctcagatctgacagctcttggcctgaatgccgaatatggagtccatttcagttgattgaatatagtgaagaaatctttcaaattttaggcaatgatcactttatcttgaggatatattttatcactgttggtattatatttcttacaccctacaaaaggtgtgtccaaaagtgctattttaattcattgtatctctgtttagatatgctgaaataactatgaaaacacaaattggaacaaaatggtgtccatcatagaggttcatttcaaaattgctttgatttttttgtgtttgttttacccccttggagggactttctgttgcagttaacagagacacacaaatattgtgcaatgtctgctactaaatcagaatttaagtgtgtgtcaatgaatatcttgaaatttgtttttatcaaattcattgaatgtatttctcaaaagctgtatcaatgatggcacttggtatattattttgttcaggtgatgctgatgggcccctgatgtggagactttgtggtccttcaaagcctacattgccattggttataccttattctcaggtatggattcactttgtcaccaacgaacgtgtagaacacattggattccatgcaaagtattcctttacaggtaagaattataattaagatcttgataaaattacttataaagattaatgatttttttccataaagatttcatatatattttgttagatttatttctacatagctattagttttgttaatattatcaatgagattttctaaattacattttttaattggttgtggctgatatctagaaattttataatttgcataatttaaaattattatttaattttaaaattattcaataataaactgcataattttaaaattattaaattttaaaattatccaataattatttaataattaataataataaataattattaataataattattatttaataattttaaaattattttgtaatttgcataattattataaattttataattttgcatacatgtaactttagtccaaagatctagctatcctcttattagttttaatatgttgtctatagattctctttgatctttctgtgtaaacttctgcaaatgttagttctttatgctttcagtcataatacagaatttcattttcttgcatccttttgctagctagggccaccatcgaatattgaacagaaggaatgatagcatcttgtttctgacctggatgtgactatgacattttattattaaatatattggttgctcttaagtttccaataaatatcttttgttaaagaaagtcccttccatccttagtgtgaaaaagctttttttaaatgtaaatgggcataggattttatcagatgattttctgcatccattgagatgattcaactttttctcctttcataagttaatgtgatgaattatatgaaagatttatttctcttggtaaaccatccttgcatttctgggataaatcctattttgtcatgatgtgtgttttatacatataatgggtattatttgctagtgttttgtgttggatttgcatatgcaacattcagagtttgtgctggaaaacccagccctactcttgactgcttcccttggcaatgggaggttttctagtcccttttcacgagcatgccagtttgtttagattcccaacttcttgtaaaagtctcaattccagtcctgccttctgtggagacccagagccctatcttctcctcctacccagtcatcaaaacctcagagcccaaccctgggacccaaacctgcattctttaccctctcagacttcactctttcactttcactcctctcactttgagtacacttactgcttctagattttggggagctgcttttctttccattgagtttgctatgaatcaaaatatgttttagttatggttttatctaacattcctttgtgttataaccaaatggctggttgaagaaggagtgaaattgattatctactcactcaaccatcttgccagttgattttccttcatcagattcaaagaagagtcaggtttcagtaaacagtattatttgtattgaacatcagaccatattattcttcagaaatgtatttttttttcaattttcaattttctatgctaataccgtatggaattttgttattcctaaacttttacccaattttacttttcttctatttaatttcatttattttatacatatatatacataaaatatacatacacaaaaaaatacaaaatatatatatacaaatatatatactatatatacacaaatatatatgtactatatatatacaaatatatatatactatatatacaaatatatatagtatatatatacatatatatactatatatataaatatatatactatatatacaaatatatatactatatatagtatatacaaatatatatatactatatatagtgtgtatatatatactatatatggtgtgtgtgtgtatatatatatactatatatggtgtgtgtgtatatatataccctatatatggtgtgtgtatatatatatatacacactatatatggtgtgtgtgtatatatatactatatatggtgtatatatatacacactatatatggtgtatatatatatatactatatatggtgtgtgtgtgtgtgtgtatatatatatatatatatatatatatatactatatatggtgtatatatataatatggtttttttttgagatagagtcttgttctgtcaccctgactggagtgcaatggcatgacctcggttcactacagcctccaccttctgattcaagcgattctcctgcctcagcctcctgaatacctgggattacaggcagacgccaccaagcccagctaatttttgtatttttagttgagatggggtttcaccatgttggccaggctggtcttgagctcctgacctcgggtgatttgcccacttcggcctcccaaagtgctggtattactggcgtgagccaccatgcctggccttactatgtttttaatcacaaaatctgatggttatgattactacttactttggcattatcggttcttttttttacttctgttttattgagagggttaccaatctcatttcagattgtggcggaatacagataggtgacagtggagtgatcacaagccccaactatccaaatgcttatgacagcctgacccactgctcttcgctgttggaggccccacaagggcacaccatcactgtgagtgctaatgactgggtgaaatgcttctgagacaatagaaccacaatagcctgtcctgcatgaaaatggagctcttttattaagcaagtgattagagaaggctttgattctacaatgagatcactgtttttccctaacattttctcactagagcacatacattggcatttattattcatgaagagtgaaatctcttttttaagcatagggaaagatatacacagaagataattctgcgtcttagagagaagtgtattcagtttcttaatatgtgttgccatcccaaaccagggaaatgtcttttctcaaaatttccaagagaaccttcaataaggaaaaaaaagtagaggggaagggagaattaaataagagacaaaaatacaaattataaaaataaaaacaaaattaaacgatttgtaagggccttatcttcgtaacagttgataaaagctcactgacaaccattttcttttttctcctgcagctcacatttagtgactttgatattgaaccccatacaacttgtgcttgggactctgtcactgtcaggaatggtgggtcccctgaatcacccatcataggacaatactgtggaaattcaaaccccaggacaatacagtcaggttccaatcagctggtcgtgacttttaactcagaccattcattgcaaggtggtggattttatgctacgtggaacacacaaactttaggtaaaagaaatgtttgctccatttgattttctttttagtgatgtatagtatgaactcataatatgtacattttgtacctactttacatcaggcttagttctaaatatttgcacatgtcatctcatgcagcaaccctggtgggataacacaatatcaatacctggcatctctattttgcatgggcagagactgaggaagcatgggttgatcatttgcctagatacatagccgataattggtagagtcgggatttgaataaaggcaattcagtccagaaactttgatctcaacacttcatgatgctgccttcatcggcaaaagggtatggcacaacctgggaatctcaagtaatagaaacatgagttggaatcccaagtgcttgaaaatatctggagcctaaaagcagaatgctgagtggtgagctgagggcaggaaaataagtccacaacataaagagccttggtttatatgttatcccttgaacaatgggaaactgttgaagagttttgaaaacgaaggtgacaagatgagatttgtaatttagaacaaatgctgtagtgaatgggtcctgagtcaaaatatgacagatttcattttaaaagaatagtttttgtgcatagaaagtataaacattgtgaaaattctcagaaaatacaaggacttgtatcacatactttattagggatttctgtaaatcttgtatatcacacaagacaattatttctggtagagtcacagttattatgaagctctttgttgactgagtcagacttcccctggttaacaaccactggctgttattgaagtgagaagggagttttaggtgaatccctgatttccaggggtttcacagcaaaagattcggagaatgcctctttaacttcattttgttttgtatgaaaattctagatttttcttcctttgaatctacataattaattttgatccatcagtcagtttcaatatgaatcaatcagattgcttaataaaagaattttccccaactcaaaatcactttctctagtccagttagagtaacgttgcaaatggagtgtagagtaatattctcatgtgtgaatggtaataaaatacagaacttagcattgccaggttacatatactacataggctcaaagagaataaaaatacagctcttgtttggagacaggatggaaatctatcctctctatggcacggattagtgttcttggttgaattcaatatcattgtaacacaactgtaacagctgaaattttctctcaatttaactcacctttccatttatggagagagcttgctgtgcacctgactggaagatgatcacttgtaaaaaatgatgaattgaaatctcacatttggaaatgttccttctgtagcagtcttgagtttccaaaattactttccttgctgattgatggctttttacatggcaatatttcaggttgtggtggaatatttcattctgataatggtacaatcagatcccctcactggcctcagaattttcccgaaaacagcagatgttcctggacggccattactcacaaaagtaaacacttggagatcagctttgacaacaacttcctaatccccagcggtgatggacaatgtcagaatagcttcgtgaaggttagtacacttgttcatttaattggagccaagttggttttgtgaacattagtgtttaagctagaaatgattcattgtcgctcaaagtaagaaaattttgctgcctggattccttggatgaaaagtgagaaagtgagaaacctcaactgttaggagctagaatttcttttctttcttacttttctaatagatcctaaagggaaaaatgccctttataatatagggcactaccacaggcaaaatttaaagcatgccacaaaaattacggaacgttgaaggagcagctaatgccagccttcaccttgggcattaagaccccacagtctgaaaaaaccgtgagaaagccatgtaaaaatgatgggaatggggcatcaggagagcaaagctctttcaaaatctaaagttataaatgctgctcgtgtggcagtggcttgtcactttccactgacttgtgactatgatgactgtcttagaaattcatttcatctgtactgttttgcatcttccaagttatatctctaaaagtctgtgacttttagagaaagagtgccttatttccactgtgcctttccagtggaaataacactggtcacgttagcccctccattcatgtctgtcatacctaccacctgcatgttcttctctgagctacttaaacaattggcctttaagttattcaactgtagaatgaagagcatgattccttcttcagtggggctgttttaagcattggagataatacgatgtaataacataggtagtgctaagtacttggaatttaaagtcacttgatgagtcaaagtggcttttattgtcagtgttattacttcctatcaactctcaaatgatgttttatatctcattgacccatgcttactgtttaaatgaaaatctcatatgtgtataacatatatatatatatatatatacatataataaaatacatttaatatacacttttcttaatggctttttccatgaactaaatgaactctcttctcatgaaatgaatcaatatcaagtattcagacttaagtaaaactttcaagtgctccagttgtaaaactggaatgtggaaaatggcctaggctcattccttctctggattgaatgggggtccctctgataacatcgggcaagcccaacgctgctgccgagtgggatgtattaggaaccctgccaaaaataagtggccgtgggaagcactcgtcttctcctaatgggcccgagatgcttgtttctgccaagaaatgctgtgtgggtggacggaaccagtaaagggacccagcttcggcaagcagcccccgcaggaagccacttaacacctgtaaagctgagattctctttacccacccagagacaccagggtaggtgggactggaaaaatgggtcccagtcacagaaaggggccagtctgggaagcctctttgtccccacaggccagacctgctcctcttccacccagagacattgaggtacccgggggtattggtaggggaaaattactataccctttgccttcaactgagaaacacacagagtccctcaggtagcaccagcaagaaccagtgagagccccggtagcaccaatgtaaaccaagcagaccagaattccaccacacagattctgaatattgaagagcaactggaactgtaacccacaaaatgtgcaaggcacgtggtaaacataaacagggtgacagcctgctaaaataaaagatttgaataggacccaaagttccctaacataataaatgacatgtcctgggtacaatcagaaagaacacgttgtatcaggaatcaagaacatcacaacttgaaagagaaaagaatcaagtgatgtcaacagtgagataaatcagatgttgaaatatatgacaaggatgttgaagtagtttccattaacatgcttcaacaatcactgacgagctctcttgaaacaaatagaaaatatcagcaaaaaaacaatggttacaataaagaactaaatagaaattatagaactgaaaaatacactaacataaataaagaacatgctgaataggctcaatagtagcatggagatgacagagaatagaatcagtgaacttgaagatagaacaatagaattcacccagtctgcacaataaagagaaaatagactgaaaaaacaaacaaactagatcaacacagacttagggactcatggacagtaacaaaagattcaacattctctcaaagggagaggagagagtgcagctgaaagaacaatcaaagaactagtggctgtaaactttcccaaatttggcaaaagagacacacctataggttcaagaagctgagtgaacctaaaccaagataaacacaaagaaatgtaagttcagacatatcttaattaaacttctgaacactgaaggcaaacaaaaagtcttgaaagcagtcagagagaattgggacattacctagagaggaagaccagttagaataaaagcagatttctcatctgaaaccatggaggccctaatgaattgacaatatattcttcaagtgctgaaacaaaggaattgtcaaccatacattttatatctggaaaactatctttcaggagtaaagaggaaataaaaacttctcatatgaaggtaaactaaacaaaattatcactaggaaacctaccattaaagatggtcaaacagaagttcttcaaacaaaaatgaaattattaaagaaccgtggagcatgagaaaagaaaaaggaaagtggaaaaagcaaaaatatgtgtacatacaatagaatatccttttccccataaagcttgtgaatcatatttaataaaacaagaaattataatgccctctgttattcagtataatgatatggaaaagttgaaaggggacctaaatggaaatcacatttccacaagtggtcagatgtggatggtggtagactactataatcacataggcacattgtcacacacagaacaaccactaccaaaactgtgtgaagaaatgtacagaaaaacgctaatatcaatcaaaatggaatccccaagatatcaagaaaagagaaatagaggaccaaaaagcagataaagtaaacagaaattatataataaaatgtagacacagaactgatatatatcagtataattgtaaatagtttagttagaccaatcacaatacaggttatcaagccaaaacatgatctaagtgataataaactgatttccaattcaaccacgtaggtacatgaaaagtaaaaggatggaaaaggatgtcatgcaaaggttaaccaaaaaagcaggagtggatatatttatatctgatgaagtagactttagagtacagaaaattacaacagaaaaagaggaatcttacataatgataaaaggatcaatccaccaggaagacataatgatcctcctaaatgtgtatgcaccaaacaacagaggcacaaaatacataaagcaataactgatagagctaagaagagaagtagacaaatcttcggttatagctgaggacttcaacactctcctctcagtaattgatagaacaactagacagataattgacaaggatatagaagaactctacaaaaccatcagttaataggatctgattgacatatatatgtgtgtgtgtgtgtgtatatatatgtgtgtgtgtgtgtgtgtgtataaatatatatatgtaaaatacaccacacagcaacatcagaatacacaattttttaggaactcttgtaacattccaaggtagatcatatcctgagacatggaaaaacctcaaccaagtcaaggaattgaaatacagagtgtgttctttgagtatattaaaactgaactaaaaaacagtaacagaatatcttattaagcactgagctgagctggagagaactgagctgccaattgttggagcagctaattaaaacaacaggccaaaatgtaagtaacagtcctgtctttcatcattttctgctgtggtgtaagaggccaaacaggagaaagctctgtctccctcaatcgtccattctttcccatgggaagtgcctggtaaggatcagatggatcagtgtagatatagaaatggtctcattgccaagtaagccccaaacaaatatgtgcaggatctgagtgctaaaaataatgaaatgctggcataaacctaaatgaaagagacaattatatttatgaattggaagactcaacatagtaaagatgtcccttctccccaaaatgatggataggtttaatgcaattcctatcaaattttctccaaagtcttttgtaggcatagacaactttttccacaacttatatgaaggcagagacccttcaatggctaaaagaatcttggaaaagaagaataaaatgggaggaagaattctaccttactatttacctaggcttacttatctaagttacagtaatcaagacaatgtggtattggttgaaaacccagatgaaaacagagaacctagaaatacactcacacaaacatcctcaattgatttttgacaaaggtgcaaaaactttccaatgtaggaagaatggttttttcaacaaatggtactagagcaattgaacatccacaggcaaaaaatatgaatctcaacctaaacctcattattttgtagaaaacctcactcaaaatagatgatagactgaaaagtaaaatataaaacttctagagaaaaaaaaatagcagatgtcttcaggacctggagataggcaaagaggtcttagattaaacaacaaaagaatgattcataagagaaaaaataaaatgataaattttaccccatttaaattaaaaatcttatgccatgtgaaatattttcatccagtctgtagccagtctgttcattttcttcacataggcaatgtactactatgtaaaatatataaagaagtctcaaactcaagagtaaaatacaaacagttctattagaatatggacaaaagacatgggcagatagtccaccaaagagactctacagatgataaataccagaaaagatgttcaacgtcattaacttctggagaagtatgaattaaaaccacagtgagctatcactacacacctattcgaagacaaatatttaccaattgcataatatttaccaattgcactctgggcatttatccgagagaaatgaaaactatgtttacacaaaaacttgtttacgaatctatataaatagcacctttatttgtaatagctgaaaccagcactaaggcctttcaacaggtgaatggttaaacaaattgtggtacttgcttaccgtggaatgtaactcctgaataaaaacaaactatttatagattaacaatctggacaaatcactgagggattatgccaagtgaaaaaaggcagcctccaaagattacatactctgctgttccatttatataatattttgaaatgatagtgttttagaaatggaaagcagagagccagaggttagagagaaggcaatgtaggagtaaattgtgtgtggttataaacaacaaaagcaacttagggattcctgtggtattggaatttcagtatcttgaatgcaattgtgtacaacttgtatataacttaatacacacacacacacacacacacacacacgagttcaagtaaaactaggaaactgagtaaaattggtgttatgtcaatgccagtaacctggttgtgatagtatactacagttttgcaagatgtcagtattggaggaactcagaaatgtgtacaaggaatttctccatattatatcttacaaatgtatgtgaatctgcaattatgtctgtaaacatttgtttaaaaaatagttgaatgataaaatataacctacaacctgactgaattatatagaacactaagaaaaatcagaaagtttttgacctgatgacagttaagtaacattttgtaggttcaatatagttttgatgagtcctctgtcatatagccaatgaaatgagttcttgataggcaaggcagaaatgaatattgaataactctttaccattgtcatcaccattatcatcattattattaaacttatgttcccaggccaaaaggtagagttgtcgaatctataattaatgacttcagaaaagtataagcacttaagcattcttggattccttcattaaagaacttgaggctctttattaagttttagcccttcttactttgcctgtttagtaatgtttgtaaaaatatagtatatggcccaggcatggtggcttatgcctgtaatcccagcacttttggaggccaagacaggcagatcagttgagtccaggagtttgagaccaggctgggcaacacgggaaaaccccatctctgcaaaaaaatacaaaaaactagccaggcatggttgcacgcacctgtagtcccagctacttgggaggctgaggtgggaagatcacctgagtccagaaggtcgaggctgcggtgagctgtgattgtgccactgcgctccagcctgagtgagagtgagactgtctcaaaaaaatacatatatatataaaatatatatacagattatctattgataaattgtgtttataattttatgaaatgtggataaaaaactgccatatactgtttccttggatatattattagggggaaatctaattagagatcattaagtaaaattgagtaggtgcattttttttcctgacatttttattgatcttaggcatttggcagaatatctgcacttttgttctcagtaggtccagcgccaggcacctcccttatctaataaatggctaatataatttgtcttcagtaggatgactaacagctggatacccagtgcttaaaaatcaattgaaacaatacggctttaaagagctgagaattattaaaccaatgctatgaatcagtgctatttcacatctcttgctatggactgatttcccaatagaaatgtttttaatgacttgatgttttattgctgtgggtgaggaatatccttgagaagagatgtgtttggaatgagtaatttggtatcattccatgtgaagaaaatgttgaatagtcaagtaagattaatacacatccaactacatccttgtttgagatagttgtctgttgatagaaagggcatattgggtattgcagattgtgtagcaatagtcctggcccctacccactagatactacccatcacaccgagtgtgacaatagaaaaatgactacaaaccttgccagaggtcccaaaattgctcctagttgagacctctgaactaggacgagcttctctggttaatatgtttaatgtttttggggtttttttcccccaagttttgtatattcattacctaatatgcatactttccttgagtgactcagcattgtagataaccatgatctctcacctgaactagggcaaaacctacctgactgttttccggcatcctttctgactcctattttccgaattgtaatgttttccaaaaaccaatcttcttggtggctccttgctgtattcaggacagtggcccgagtctctaacgtgtcctgcagccccctctgcaggcttcctcaccccttcctccttggttttctctctcttctctgaactagccacggcctttcctgccatcggggttcgctcggggcaggctcacttcccccagttaggtaaagccaccaattatatattctcaacagccccatcataatgccttgtttatagctggaattttgcatgtaaatttatgattctgtgattcatgtctctgtttttccctggactgataagaattggtttgatttggaattttggtgctcaccgtttatttcctagcaactgttttttgcatgagtatataaattcagtcattcgaggtggccagaccaattaagtgacagcccaggtctacttgggagttgccaaccaaatttttggtgaatagcacacactgactggatgtcagcttttcatcaaaatggaccctacaattccacacagccaagaagtgttctgatttattccatttcatgctgattatacgtatacttggaattcatgcccactttcttcatgcaccacgatgtgcctcttgcttgctggtgttgtccagctgtgaccacaatctgctatcttcccaggagcagggctgagttccacctggctgctccgtctccctcagcacccgggaagctcggctaggtcagggcaactagaagttatgaggaaaccgaacagtgatccaggaaggtggatttttaaaaaatcaccacccagctatgcaaaaaggaacaccatctccttagagaagtcaagaatgggacatgctattttaaaaacagctttaaaaaaattattctcaaaagaaaatactacagatttgtccatgttttgtttactcttatgcttagttctgtatacgtgtgagtgccattattttgaaacctaagtgcattaaaatattgatgggaaacccttgagcattaaagttctgtgtatgtccgtgctaggtgtgggcaggaactgaggaggtggacaaagccctgctagccactggctgtgggaacgtggctccgggtcccgttatcacaccaagtaacacattcactgccgtcttccagtctcaggaggcaccagctcagggcttctccgcgtcctttgttagccgtaagtagccctaagaaccaaacccagaggtctttgcgggagtgtggttgtcacaggcaggcagggttggctaaacctgggggtctaggggaggagtatgggggtctacggggaggatgagtcacctaatcccaagaagacacctttcttccaaatagcagtgagaacagaactgaattgagaagtgatataaaagccatgaggggcactaaccaacgtctagaaataagcctggcatccagagtgggctgatattgggcagaagcgcagatggctagttcgttagcaacaaccagtgtggctggcctgtggcaccttgaccacaaaatcccgtggggggcttgaaacacatgcagattcctgagcctcactccaggcccaactgaattcagaatttccatgacgaagtctttcctgttttttttttttttttttgacacggcgtctcactctgtcgccaggctggagtgcagtggtgcaatctcggctcactgcaccctccacgtcctgggttcacgccattctcctgcaacctccacctcctgggttcaagctattctcctgccttagcctgccgagtagctgggactacaggtgtgtgccaccatgcccagctaatttttttttttttgtatttttagtagagacggggtttcaccatgttggccaggatgatcttgatctcttgacctcgtgaaccgcccgcctcggcctcccaaagtgctggcataagccaccgtgcccggccggtcttgcatgttttaactgtcatccagagggttctcatgctaagtcaactttgggagccagtttctttgggaatgttctttcctaattttgattaggaaggatggatctccttttctagctattgtacactattagattcgtgggaaatgtagcatttttcaagtcagagaagcaatggtgtgtgcctgttggctgagttaaatcaagtgtagccactcatggcaaaccactgtttagggaaaagtttgaggaaaggaattagaggaagtaatacagtagacaggtttttcagactgaatcagagagtgctggaaaggaagtactgaaagacaaccctagaccaaatcttaggtctgcaggtggttcactgtgtaagtgtgcacgtgtgtacttgtgtgtgttttaatgtcaatttaaaaggatagagatattttcgtgcttgatagatcagagagtgaagtggattaactagtcaatggttatatgaaaacaaatcattttagtggtgaaaagatatttctttctgtttcgaaaaccagggatgcatgtaagaatttgataagagttgggattaataaatccagctagttttaaaaagcaaccattgttgtggctagattacaatggtaatgaaaatagcagttttctaataataagacattttaaaaacattaattgtgtaaagtactaatcagatacaaatcattttttatctgttttatttctttatctgcatgaaccatattctatcattgctcgtttatcctttcttaatatcttaatattaagggatttgcagtagatttgtggtaatattacgaggactcagtccataaaactctgcagcattttctaaaaatgtataatattcttattaagcacatatgtatgtttttaaatcagagctttattctcttcattcttgcttcttccatttggaatatctcagggaactatgtctatagataatttaggaaaatgcctctttccttcatggacaaaatagatacacgagaaataaatgatctgatgatgactttttgttcccacataggatgtggaagtaatttcactggcccttcaggttacatcatttctccaaattacccaaaacaatatgacaacaacatgaattgcacctatgtcatagaggctaatcctctgtcagtggtcctcttgacttttgtgtccttccacttagaaggtaagtttattcttttaaaaaaattacgtttaattgacaaacaaaaattgtatatttatggtgtacaacatgttttgacatatgtacatgttgtagagtggctaaatccagttaattaacatgtctgctcactcacttacttagcactttttgtggggagagcatttaaaacctctcttagcaatttttaagtattcggcaagtaatcaagtatttcaggtattcaaccttgttattcgctattggcaccatgttgtacagtagatctcctgaacttattcctcctagctgaaattttgtatcctgtgaccaatatatcctaaatctccactcccacataccctaccagcctctggtaaccaccattctactctctgcttctatgagttcgacatttttagattccacatccaagtgagatcatgcaatgtttgcctttctgtgtgtagcttatttcacttagcataatgtcctccaggttcatccatgttgtcacaaatgacaagattttattcttttttaaggccaaagagtattccattgtgtatatctaccacattttctttatccattcattcactggtggacactcaggtccattccatgtcttggccattatgaatcatgctgcaatgaacacgacagtatagataatctcttggacacgctgatttgatttcctttggatctatgcccagaaatgaacttggtggatcatatggtagttctatttttaatgttttgggaaactgccatgcatttttccataatggctgcactaatttacattcccatcaaaagtgtacgaggaagagttcccttttctccacatccttgccaaaacttatctcttgtcttttgataatagccttggaagataagttcattcttaagtaaactctaattggttcttcagaaatgaatgaggagtaagtagaggcagaagtctaaaactcaccatttaaagaaaatattgaaaatatgttacagagtagatttaatgtaaacgtgattaaaatttcatccaatttttaaagaatacaagtattattctatgtattccatctagaagtaaaaaaatagtgacagaactttaacaacacaagtattgcataaattgcttaaagaaaataagtctgaaatgtttcatgttaacatagcttttaatttattcacttgcatttaaagtttatagacatacgtgtgcacacacacacccacattcatgcacacactattaaccaaaccagtgagagaaactgtcttattgagtcaacataggtgttcgacaaatattgaataagtaagtaaattaataaaattaatataggctgggcacggtggctcacgcctataatcccagcactttgggaggccaaggtgggcagatcacctgaggtcgggagttcgagaccagcctgaccaacatggagaaaccctgtccctgttaaaaatacaaaattagccaggtgtggtggcacatgcctgtaatcccagctactcgggaggctgaggcaggagaatcgcttgaacccaggaggcggaagttgcggtgagcctagatcatgccattgcactccagcctgggcgacaagagcgaaactctgtctcaaaaagaaaaaattaatatatgtgccctgcttttagtaaatactaccattgggcgttctttcttctgctccatctcggtcatcttcatcttctcagtcctgactcttcagtgcctgagttcctggccacaagtgccctctgtgttcattctcccactctagggaatgggccgttggcagagggaacagtagagatgccgatttgggctgggctttgactgacaatagacaccacttggtgtttaatggaggctttcacacagtggaaaggaaattccttcaaatagatgggtattttcaaccactcataaccatattaattttcttgttacatatcagctttctatttctaaaccacaatttatctgcagatttgtcaagctacctcggtatattcgaaatttcttactcttgggttagtctctcatggcagtgaaaagttacactttgcaaaatgttctatagcattcaacatctgggaaatgtatggtttataaaaatgacatgtcagaactcataaatggataaatttaacaaagcttgtctcacttaatcctttttcctatgacctcactgccttttcatacatctctgcagttgtaattttcagcacatgtgtttgcttaaaaaaatgccaagtgtaaatcaatgtatgtcactgtaaaaatggaatataaagtaaagtgtcatcttttcagcatttgctagcccaaaatcccagtaccataaaaagatgcccatgatatatgaaggcttgagggagggtaaaatagtttgtataagatgatccaattttctttctaaaataatgtgtgtgaataaaatctataaggctattaaccagtacattaagagttgtcaccactgtgtgatagatttattcgagatgcttattttcttctttatagcttttatgttatttttataattaggacaattattttaatagcaggggaacaacatgtggcttggattttgtgtttgtggtcattaagttaaataaacagtgcatctcacaagaccgtatcactcagactaagaaaggagactctagtaattgtactataaagccacagaaagcaatgctgataccagtggtatatgtattattataagagactctatcatgacctgagacagctccctgagctcagttatcaggtgagaaaaaggggagcagccctggaatatctcagtatagtacagggaaagtgagcacagcatttaggatggatcttaatgccaggtcagccacttactgctattcaagtgactttgtgcaaattacttcacctttatttctgatacttatatatatatagcactttgctatatatgtgtgtatgtgtgtgtctaatatatatttattatatatgtataatagtagttctgaaagtcagataatgttagattgatttctgcttccgctaatggatttgccaatcctcactcagttgaagactgattcttttctaagatggtatccttacaacaatgccttgtgacatttccagtgtttaagtgttcagcattttcaaactgctgcctgagtaatttctggctatagattcatctaattatgatgattccccaaaagggtgactttaatcaaatttattttataattagcttcttatccttaaccatatcaatgctgacatttattgaataccatcaccgagctacagattcgctagctacagtaaaagtaacctttccccagcccttctaaagtgagcctgagggattcatgtgcaatatattgggatgaaaccgaggattgctctgaaggaaggtcatagctttattgagggagccttggcctttctagctgctataggcacttggaactgtttctgagagactctgttcaaatggctaagcatttctgagcccaggatcccagcagagccagtgttgacttaggtggtgatgaaggttctagatctgtcatcttggtggaccattagcacaaaaggtgggattggcaaggaaaagatgtggtatcccaggctacaaaatactgtgaggaaacacacttgtccctatatggcgtctactaaacattgacacctgcttagggagggttttaccatgaagggaaaaatacagattgttgaaccacactcaactcttaggttacaaaggctcagtgacctactttccgcttaccacaaagtaagttgctccaagtttaatgttggtctaaatttctctaactttctcattacttttacatttccagtactagacattccatgaactacagaccattgatgtttgtcctcattttggaatctggtattattaaataactgcttattttattttcccaaatattaaacagtccaaaattttgtgttctcattattcatgtggccaactagaagccctcaatctgctaaaaaaaaaaaaaattatagatccagttttcttacttcatagataaagcacttcttgaggcaaaatgaagcaagccagtgccttctaaaccttgattattctttcattaaaattagatagtaggccgggcatggtggctcacgcctgtaattcccccactttgggaggccgaggtgggcggatcatgaggtcagggggtcgagaacatcctggctaacacggtgaaaccttgtctctactaaacaaaatgcaaaaaattagccgggcgtggtggcgggcccctgtagtcccagctactcgggaagctgaagcaggagaatggcgtgaacccgggaggcggagcttgcagtgagccaagattgcgctactgccctccagcctggacaacagagcaagactctgtctcaaaataaataaatacataaataaaatttaaaaaatgaaaaaaattgggtagtaacattaattcaccttggtgataatgaggaatttagaaattctcaatttaaaaattctacacgccgtaaactgtaaactcagtgtttctcagatccagtaattcttgacaagcattggagggtgcagcagcgcttagctcgtgaggtggaaacaccaaagggacaaatgcctttgcttgttgtcctctagagatggcttcaaagccccaacaggagtgggcccagattcacacctaatatttgcctaaattctcttggattaactgaagtcccagtttatgggttatatctaatagaaagcttaaagaaaaaaagtaaaaaaaaattagttttagatttttctttttgacatttttttccccatcaagaagcacaataaatgagctttgtcagttttctttatttcctcctatttaaattttttaaaaactggtattgctcaactgctgtttcttctctttgctttctcagttgtttctaaagaactcagaatgtggtcgcattccacattactttagaaaaaagtgggcagtggtccttttgaaatgtttcctattgatattttattcaactggcagagcactggagcagatggtgtagtttctgtgaaatcccttgtttgcctgtgttacactccaatttgctttaatttgtttggccttcgtgcgcaatggaacttagctgtatactagtacatgcttccccctcctctgaatcatgcctccgtagaggagaccagtctcccagctactcagggtaaagttaacaagacagatgataggtctcagtcactgctgcctggtaattcatgtgcctctgcctagaacccatttctttcttccttccttcctttctttttctttctttcttcctttcctttcctttccttccttccttctttttccttccttcctttcttttcttttcttttcttcacagagtcttgctctgttgcccaggctggactacagtggtgcgatctcagctcactgcaacctccgcttcccaggttcaagcaattctcatggctcagcctcccgagtagctgggattacaggcaccagacaccatgcccagctaataattgtatttttagtagaggtggggtttcaccttgttggccgggctggtctcaaactcctgacctcaagtgatctgcctgcctcggcctcccaaagtgttgggattacaggtgtgagccactgtgcctggcccctagaacccatttctatttcctgaaaatacttgatcttatctacaacatggaaatatcccaaacaaagggttttccctcatctctagtcctctttggtgtctcggcccacgccctccccccactttggagaaaaactgtggtccaactctaaatcccacaagtttattctatttgtggaattactcatccttagttttccttcagttctctcatagttcttagaactatgatgaagtttggaattagacattgcccagtaataaatcccggaaaaatagaacaaaaaattaaattttactgcatggtatagagccttgcccattgcaaacgatgaatatgttttaaagtttttaggaaggatggaaaatagtcataaaaacaaatgatagggaatcgttttgcagctcagagatttcagtagtaaatgtctatcaaatcacttgttgaagacagagttaagaattactgagttcccggtcccatgacgtggactctagtccacggagaaagtattgttcaatttcagggtgcttctcttcctcacaagttcgcatatgtctgatcgaatgctgcctcttggtcataaactcaactgtgatatccatcttgcttcttgaagaagtttttccaaacctcaactaagtttccttctctccctagaagacagtcaccccaattatgagagtgttgtgtatattttgattatacatacaattggctcttccaataatgatgagaaagtgtttaatataattattttctgatgcctttagtctgtcaccaacaccttctcactgaagaatcaggctgatatttttgatctaatgcagtgatgggatatatagaactttagaatatgatatatgtgtgtaaagtacttaatgtctagtgacacacatatccattttcttgcatattactttgttgatgttaattttttatattttcttagactttagctaattttaccagcttctaatattatgtacatgtttgatttcttttggagagaatttgaaagggcataacatcctaccttaaacaaacgactactagaaaggatacaagaatgttttaatccatgaaataagttgccagatattataatttctacattttactgaattaggctttgagaagcagactgtcttacataatttgtttagttagttgatattctattgccatctacaaaaaatctaaaatcccttgtcaacttcctctgcatttccccaacaaacttccttattgttcaatacagacatttaataaattgttgatgagttttgattatgtctcgtaccactgccatttcatgaatgaactttctgtatttcaactagttcctttaatcaactatttgtcaacataatcaagtataagtgacactataccttatgtttcacagccttttcactgttttctaagacaactgccactgtgatcatttatatcattagcccacaacttaacaactaactctttaatacctaacacatgcatagcagcctatttgatcaaatgtgggaccaagatttcaatccagcatcagcaatttttccctacattctgtgattttggttttataacttgatatattgttgctaaataatttctataactaatgcacaatttttttattctcaaactcatctactttgaattttttaaaattccagtggagcttttgatgtcttaaagacaaatactgaggttataactaaggtacataatttggcaatattcaaaccatgaatctgagtttaacttatttcttttttgtcctctttttccacatcatattgcttctaattacatgaaaaggccattgaagttcagtctttcactctttcaacttatagatttatgcccaattagaaatatttctattccagcattttcaaaataagggaattctttgaggttaatttaaaaatgtatatcttgaattgatacctcaagatttctgcaggctgaatagaaacttagcgaaggagctgaatgtattcttaaaatgatttaagaatgtgtggtaactctttaatgcacagagatgctttttaaaagtatttgtcaagattctttgaatggcaagttatcttcaaaagttagcttagatacaaagtagggtttataagaaggatactgggtgatttcatctcatcaaaggaagggcttctagaacaaaggaaaccagggacaagaatctgtcagcatgctctctcttccccgctctttttgctgattgctgcacaacttctttttcccttacggcagcctggcttccttaatgtgtcaggaaacatggctgcagacattttttaagtttagtatctttggctcctaccattgactcttactcagttgcagtttggacacatctgattggcctggattgggtctgatgccatgccttgccattgattgactggaattatcaatcagtcaatcaatcaaccatggtcaggatggtggggttgtataaacaatagcaacagtgactctaatcatgaaaatatctaccatatccattaggaggttttatggcacaattaacaggaaacttgattcaacctggtttaaacacaaaggagcaattcattggtttttaattctggaaggtttcaaagttgggtgtgcctcaaatctctcaattcagcattttaattatgtcatcaaatattcaactgtttctgtttttactttgtgctactccagtgtgagcctcatcctaaggctggctcctctcattgctgtaggggtgctgctctcacagtgggtactcctcacccacatcagaaagagagatggcttctatcctgtggtaagctagagttgggttgcaccatcttgcaagagtcaattttgctcatctattcctattctgcatttaatgacttgttgttaatagcttgaaattggctatcgtgggagtatttatacgatggaaattggcaaatgccacaaatctctcggagagttggttgttatatttaccagcatactactacctctattccaacttccaaatatcaaacaagggtgttgaaattcacctttattggactggattgggtcacacacccacctttgaaccaaggtctatggccaggggacttggaattataaagtaagtgtgcataacgattttgtcagcgtgctcttgtaggaagagtattctaacagcaaacagcaaacaggatgtctgatttcagagtccaccgtgccatagcatgtgcttatataaaataatgtagtttgggtcattcccaatggggcatttgtaagtaagtaaattttgtgtgttggggtgatgtggatcattagatatatgttcaagttagcatcgccatgaaataaaagcattttgttcttgtggcttgtaaatgaaaatgggaaaatatttcacattgttaatcatcagagcaattaaaattaaatatcacaatgaagtttcgtttcgcatgcaccagaatggctaaaattaaaaagactgacaatgtcaaatgttggcatccctgcagagcactggaagtcccacacatccctggtgagaatgtatactgatgtaactactatgagatatagtttggcagtttcttgtaaaattaaatacatacctaatttgggggctaataatttcactcccatttatatacccaaaggaactgaaagcatgtgcccacacaaaatctcatgcatgaatgttcatagcagcattatccataatagccaaaaggtggaaacaaaccaaatgtctgtcaactgatgaatagataaacaacatgtgctatcactataaaaaggaaaatattcagccataaagaggaatgacatactgacacatgctactacatggatggactcaaaaacattatattaagtgaaagaagccagccacaaaaggtcacatattgcatgattttattcatgtgaaatgtccggagtagacaaatccatagaggcggaaagtagtttagtaattatgtagggcaggagaccatatacaggaaggatgagactggagtgattgttaatgggcataacattttcctatgggcaatgaaaatgtagaattgggaagaatgtcagatgccaaaaatgttgtgggagagtaagtcggcaacaccaatctagggatcatttggtaacctgaaaaatagtcttaccttagtgccagtatctaacttctgaaaacttattctgatgaaatgatgaaaaacttcctcaaatatttatgtacaggaatgtttgtttcaacaatatttttatttacagaaatgtggagaatatagaatttcaagcaataggggattgatggaatgtggatggcacatctatatgttggaatttgatataggcattaatatattatgttggtgcaaaagttaggctggtttttttcctttcctttcataataatataatgttttattttatttgagatggagtcttgtgctatcacccaggctggagtgaagtggcgcgatctcagctcactgtaacttctgccttccaggttcaagcgattctcttgcctcagcctcctgagtagctgggactacaggcgcgcaccaccacacctgactaatttttgtatttttagtagagacagggttttgccgtgttgcccaggctggcctcgaattcctgaactcaggtgatccgcccgcctaggcctcccaaagtgctgggattataggcgtgagccaccatgtctggccctaatataatgttttagaagaatatttaatcacatacaaatgcatgatggatgtaatttcatattgatacaaattaggttaccatatgggtgtcatttcctattaatacaaattaggtatgatccaagttaatattttaacagtatgtgttcacctacaaaaatcactggatatgttgtagtggacacatatctttttaatttcttgtttattttgttttatatttttctttgggggatggtaggctggagcatatattcacattataattggcaaacaaaacaataatatatattttatagtccttaaacactaatagtgtttgtgtgaacatctaaaatggttgttcaataaacattaaggagtttctaatgatatctccatgataggagtcccttatctggacataagcttggagcaagttttctcagtagcagcgctattgacatgttgggctaggtagttttttgtgggtcccagagggtccggggtgtaggtgctgccctgtgtatagcagcatcttcaggagcaaccctggtctctactccactctacagtgtgacagcaaaaatgccttcagatagtgccaggtgttcttggggaggcaacacggtccccagtttacagtcactgagttaaaggaaccgttatctaaagaaaggaaattctgaattgtttcaaggtggaaagtgtctactgtgaagtcctacctgttttatcatacctgtgcttgttttgtagttagagtaaacattgtttcaacaggaaactaagttaaatatctcgtttctcattttaatttttatagcaattgcatgagtcatcatcacatttttgtttttatttttatggccttaattgtttgtgtaggttctgatcataatgcggttgttccatgccttttccagctcgttccgctgtgacgggaagctgtgtcaacgatggcgtgcacattatcagaggttacagcgtcatgtccaccccatttgctactgtgtgtggggatgagatgccagctcccctcaccatcgctgggccggttctgcttaacttctactccaacgagcaaatcacagacttcggattcaagttttcctataggataatctgtgagtagccataatgacagagtttggaattttcttcttttctgagtaatgtatacaaagagttttcactgcgattcatacagcactaacttgaagattcagagaatttaagggaaaaagattgtcagtgaggttcatggttaaaaaatacatatacacattttttcttaaaaagaagaggacctttttcaggaactttggctagaactactctgaaaatcaaatgaagaattgacatttgttttgtaatttaatttaaataaatactactgctatttttttgtttttcttaccttacacaaagttgcctgttggtccaaattatccagatgcctgttttgtttccccaagtcattttgctaatacaaaaattaatattttatatatttagaagaaatataagagaatgtctttacagtctgataggaaagacttttttaaaacactatgcccaaaacaaaagccctaatggaaaagattgatatattcaactatgctataatttacaacttctctgcatcaaaggcaaagagaaaagaggagcaatagactggacagaggcatttgttgctacccagaaaattctaagattgcatttcctgatcttgaatagtcttttcccctcctgcctggttagtttgctgacaatatttatgcactatctaatagacatctcagctgcagtcaaactggcacacaaatcttgtaacatctttcttgagtctatttcatctttgctccaccaaacccattgctaaaggtagaaagttaaatagtttcccttggaataaattattgttcccatctccagagaagactaaaaacatgtatttacttctgaaaaggccctccataatttgttcacattagctgctatcggcatcctgactcccacagtttgtaaagtatgactacatatggctgtgtagctctgttggctctagcagaatagaaccacgcaattaacgtttcctctcccgtcgtcttgttgaataaagagaaggatggatttgttttattcttttggcacaactgctgctttggagaggtaaactcctgctttatattcttcttctctttaatctctcattttcctacaaggaagtagtcaagattcaatatattctagtataagagtcccacttaaagagtgtcgttgatgtgaagacttcaaatgctgatattgtgcaaagatgggagttatttaggccttgataaacttccagagaccacataattgtgtataaagtgaaaaggagtgattgctacccttatctgacatgtaattcacttttacagatggacctgggggtctgaacacacaagtacttacaggcacatagagaagagtgctccctgcaaggtgggctcagttgaggcaaaaacagtaaagaaataaagagcctgacatggcagcctcaatttgttcctcatttctgaggatgtaaagtggaacgtgtccactgatagtgtataaaccatggaaatacttcaaaatgcgttaaccccattataattttagaatcataaatatacatagataggtctttccactgcagggagagtgatcatcaggaggtacaatctgatcctcatatgtaaacccaagcaaaaataatcactttatattgtggataagaaggctttattacatttttatgtctgtcgttttattgactaatggatctagctcaaggctctgagctgttaattgctggaatcctggagaggaacgggcctggcctcctcctgcttgttgaggattgaggatcagtgatattaatacaaactggggcaagtttagtccttaccagtctcacaactgactgcaaatccaccagactggagagctatacatttgagcccacagaaggaactaaactggaaagctccaaaaatgatttccagtagtttaccatataatattctatccctgacaggagagacagggatctctattatttcagatttccagatcacaaccttcctagatctgtacgcccagaacatcattctggccgccttttccgtacttcgttactgttgtcatccctctctcaacctgtcaatgaaatacagctaagtgatggtgaaatgttcctgctcgtcattttcactctggccattaatttgactcagactgattcctttccaagatgagcctttaaatattcttccctgtttctaccctcttgctgtctttcatcttccttcctagtggaaaaatcagaattatgtgtaaacacaatgaagggagatataagtcactttaagaaaaataattattacctcttttagggaaaaatgtacaatagtatagaatctcttaaaatcatttttccatgctgggactaatcgttgttctcttcatattcccttgtcttctgttgcagcctgtggtggtgtgttcaatttctcttctggaatcatcacaagtcctgcctattcatacgcagactacccaaatgatatgcactgtctgtataccatcaccgttagtgacgacaaggtgatcgagctcaagtacgtaagacaaattggctttcttaagaaaatcctttcagcattatttatagaagagccattcgtttattgatggagggcactgattctcatcggcagtctggagggaaatctacacagaggagtgatgttcctagatgacagttcaacctgggaaatgacgctccccctctccacacaagccggtagtaactaagggcaaaaaacaagcactcaccagttaaaacagtcgttatagtttcccaacaattgtgaaggagcatcataacatggattgtcaaggtataataagcccatcttgaaatcaaaggagagaggaagggcaagagaaagcagttgccatgtgttgggtatttattatacacaaagaactttgattcacacgtgccgtaattgtctcattgtattcttaaaacagtcatatgaggtatatatagattctagattgggaattgtatagattattcccatttcactgatgaggaaactgaggctcagaaggatcaaattgctttccaaaagtaacacacacataaagagtcaaaatgtgtattcatgccaggcttcctccaaacaccacatcctcaatgtttcccaatactgtctctcaaagtatacattttcttttttcttttcttttttttttttttttgagagaaggtctcactttgtcacccaggctggagtgtagtggcacaatctcggctcactgcaacctctgcctcccaggttcaagagattctcctacctcagcctcctgagtagctgggattacaggcaggcgccaccatgccctgctcagttttgtatttctggtagcgacggggtttcaccatgttggtcatgctggtctcgaactcctgacctcaagtgatcctcccgcctcggcctcccatggtgctgggattacaggcatgagccaccgcacccagcctcaaaggatacattttctaactacttaagaaatctatttttatacctgtgtcagaacacctctaaactgatgctatgagagatagcttgagtcactggtcaattttcttcccagtcttacctattcccaacaagactgatgagggcaatgcaacctcccactctccagaatgataaagttcaagactgttttcacctgacagcctatttcagtgatatacgtatggcatgtggtgggaaactctgacagtaatattgttcatggtcatgtaggactttccatacagaagcctgatgggctaagaccacacctacctacctacctacctacctacctcccctctatttgtctgtgatcattttctaccctaaagattctgtactccctgcagtttacttccagaggcctcatgtatcagttggctctccaagtgaacaagagatgtcttgatgaaagacatctctcatcaagcctgatttggttcctgtatcaggcgttctataggctggacctcgaagaaaactgcagctcttacctggactatttgtaggaaaacagagtgtcttttaggtcttggggacaaaagaacagaaactgtcagatggccaggagcaggagttctgtgaagtatgcctgcacaggcgtgaaagtgtaagggggagccatttgctactgtgactcactatttgtttctcatatgtgtaggattgattattgccttgttctgttcaggttgctttaacaaaatatcataaactgggtggcttataaacaacaaaaggctgcaaaagtccaaggtcgaggcagattcgttgtctggtgagctcctgttttctggcttatagaaggtaccttcttgctgtgtcttcatgagctggaagggcctcttataaaacactaatcccatttgtgaggggtcctcccccatgacctaatcacctcccataggccccacttcctataccattagcttagggaacatatgaatttaggggaacacaaacattccaaccatggtatacataccaactcatagaggtatgttatatattctctctctctttatctgtctatctatctatatatatatgtatgtatacaatctaaatgtattttttcagttttcagcctggatcctggagctcaccataatgaaatttacatctgcatgtttattttattttacttatttatttatttgagactagctctcactctgtcgcccaggctggagtgcagtggcgtgatctcagctcactgcaacctccacctgctgggttcaagcgattctcccaccttagcctcctgagtagctgggactacaggtgtgtgccaccagcctgggtaattttttcttttgtatatatatatatatttagtagagatggagttttgccatgttggccaggctggtcttgaatccctgacctcaagtggtccacctgcctcggcctcccaaagtgctgggattgcaggtgtgagccaccacacccagcctacatctgcaggtttagaaaattatttattgcgcactaagagcctacattctaggaaacagataagattctaggtgtggtagaagatgcagacattaataaaaggctctcaaaagattgtggttacacaagcttttctgtcaatgggcttttcagatctcttctgtgctctcctgggaaaatgatgtaaaataaaaagccaaagcagatttaagtcctcttagaaactcagattttatctctctttgtggattctttttgtgaaaaataaatgtgttgtctgtagagaattaaaatgaatacagtgttgttggaaattatctagctattgttcttccctgatcttttacaataacattaaatgttaaatgtggtaaaagaaaatcaatacggttttcatcttgttcctcatcagtctgaaaaccttcaaccaaccaaaaccttttagaaaaaaaaccaacaattttttttctcaaggctgttgaaaggaagcatttattatatattttatatataaatatatattatttagtctatattttcaaaattattccatattatggattgtttattagagctactgccaaaataaattgaaaatgcaggctgggcatggtgtcccatgcctgtaatcccagcacagggaggctgaggcaggcaggtcacctgaggtcagaagttcaagaccagcctggccaacatggcagaaacctcatctctactaaaaaatatacatgtaattaaaaaaaatagccaggcatggtggtggacacctgtaatcccagctactcgggagggtgaggcaagagaatcacttgaaccagggaggcagaggttgcagtgagctgagattgtgccactgcactccagcctgtgcaacagagtgagactctgtctcaaaaaaaaaaagaaaaagcagaagaacctataaaaatgaggacaggatatcaaatattatttttttaaacaagttttaaaaataagctataataaacccaccacaaaactctaaagtaaatccatgtaagaagccttgcttgttcaggaactctagaaatcgttatttgaaatgacaaagaataagacctgaattaaacactgtataagacagagaaaagttagggatgcatctgtcaggataggttatgcacatagtaacaaacaactccacctcacagcagcttaactcaacaagttgatttctcattgtaatgagcatgttcagtgtggcctggcatggaagctctgctcatcgtggtcatccaacaacccaggctgatggaagcttcgtttttacatttgcttccatgatcatcactgcagtgggaaggcagtgtggcaaagcaagtagtcatttgtaaagcttcttccgtaaagtaatatgtatcccttctgcttacatttctgtggtcaaagcaactcctagcagccatgtcaagcctcaaagtgtgcccctagggcaatcctaccagtgctggggaggcagagagctgggaccatgtgcagaagtgtcagtgaccaccacagaggtcttaaatgtaaatttcctgttcttcacctgaccttaacataaacttcattttaaaagaggaaaatgagactgtgaggagaatggagctgtgattctaaaagcagcatttcttctattatattaacatgcttcccataagttctacttcatctcataaaataacaagggaagagtaaatatggtatttttaatgagacctaaaaaactaaagtattgctgggatagtaaatatcagttcaacttgtcaaaagttgttctcagatggactttaatatgccctagactgtgaattccttgaaaagtaagactgtatcttactcactttgacatccccagctgctgtcacagtttttgttgtattgtaattactaaaaacaaatttggctaaacttttgaactgatcagtaaagtactgtttgatttctaatatttcatatcaagtgagttttgaatgctctactggtagttttttccttgtcattttttttgcaagagctaaagctacaatttaatagaagtccaaatggaaacatcagtattaacaaggtacatttcacaggttcagtgattttgatgtggttccctccacctcctgctcccatgactacctggcaatttacgatggtgccaataccagcgatccccttcttggcaaattctgcggttccaagcgcccaccaaatgtgaagagcagcaataatagtatgctcctggtgttcaagacagattcatttcagacagcaaaaggctggaagatgtctttccggcagacattgggtaagaattctggacttgtaaatctatttgtcaggactgttacctttctgctttatttaatttccccgccccccccccacccccacctgattatgattgcttttccttgaagcttagaagaatatgccatgtaagggcttggttttaaaacttacgtatgacatattttaatgttgtaaaaaaatcactcaacaaatgtacccagcactttgggaggttgaggcgggtggatcacctgaggtcaggagttcaagaccagcctggccaacatggtgaaaccccatctctacaaaaatacaaaaattagctgggcatggtggtgtgtgcctgtaatcccagctacgcaggaggctgaggtgggagaattgcttgaacccaggagatggaggttgcagtgggccaaaatcataccattgcactctagcctgggtgacagaatgagactctgtctcaaaaaaaaaaaaaaaaaaatcactttggtagcacagtggaggaaggctagaagaacctacaacatgggaaggaagaagcttatgatagaaatctagatgggaagtgtcaaagccttgaacggacccagaggggaaagagataaagggaagggcagaaatctgagagacggaaggcagaatacattggaagcacagtgtttggactctgatgatattttaatgaggacatgaattgaggatgactttctataggtaatttgttggatgatggtggcttaggagactaagatttaagggagaaatgttttatttaatttggagtattttaagttggaagacctgtttaaatggagctgtctagttggaagctgatgcttgagaaggaatttggactggagagggtgatgtagcgggggtaggtaaagttaggtgagaggataaactgaaaatatgccccagattactcccactgcatgtgagaaataaattatccacatcaaacaccactggtgagaaatacccatatcaaattaactcagaattttgaataatttaaaataaaaggtagttaatcaattacctgtttggctattctaacagcatcagtgacacagtctaagatcattaatattcgactctggaaagtgttttgatccttttccttttgaatatagatgtgattaatgttctaaaaatgcacaactctccaaacaaatctcatactctgtgaagactcagaaaaatccaggcagttttctgtaataataaccctgattcacttttcaaactttctgtttcttccatagtgtggataaacttcgtttctctgatgcaaaacggagtttaccttcaacttcttgatattgggcatgtgaatttttccatgcagtacttgaggaaagcaattagacattgtgttttgaaggcttcccggtaaaccacacacctcaagacaaattgtatcagaaaatccctttgccacctcccctacttagctgtctcaacagtaacttgaaagcaagtctcacgggcagtgagagagtgttgccttaacagaattgtgtaggtgaagtagcatacaaaagccagaaggctattttgaaagaaaaattaattttcctttggagatttttttttgcacaaaaaagggatatattcttgcctttagcacagactttagaccaaatgtcctatgtctgcatttgctttgctacctttcaagttgtttttctttttcctaatatagtctcacaagaaaatggtaattgttgtgttaacaatctcctcactgctatcatctgcatgaagcttctcaagtgagccagggttccctagcctcattaaattaccatgtctttccaagccacaaagaagacatttttagacctattgtgatttaacagaaggaaaagtcttacactgtcagaagcattctctatgcacgagtcattgaacaattacagtcacttactgttttcctctggccacagttagggaaaaggtttaagtggagaatgtagaaacggaactccttgccagcattgtgttacccctgtatttcatgaagatgatttttacctctttttcatctgcataaatgccatcagccacttggaaatacttcaagtcattgtaactactctttgatggtaatgtttaagtgaaaacctaagtattatgattttgcattgcagtggtcttacaaagctttcaagaccacacactgacaagtttattgatcattctgcataactttcaaattttgtttcattttggtttttattgtttgtagtgaggagagggggaaggaacaataagaatagctttgactgtaaggtttatagggtcgtttagttatagctttggatgaagacaaacttggctaataggatgccccttttgcctccaactcatttatgtaaaacaactctgtctttcccctgaagagagggaaatcaactttgtggaccagatagtggattttcatttacaaagctgtttgctcagcctggaaaacaatatcttcacttagtaaataattgatgtgaagaggagaccattttagtctatgacatttccgtttcgatcttaactaaaacactaagtagggttttgcagatttgctatttagattatacacttggcaatgttttatgtacatctgcttcaatttttcaggatgaagagattggcttatataattatgtgactattaggttcaattcgccttgtgcatttgttatatttgtattgctagcgagtcacagcaaatttgggggaactatccctagttgctaattactaaatatgtagtgaaattgggtctcctttttcctcggaacttctgctgctggaggcccatatgcatggatgcaaggtaaggagaaagcacatttggcaagcatgagctgatctctaactgcaatggaaatgtgcctgcttgtctcccccctgtgctccaatgctatatgaataattgatcctgaatggctgacaaccagcaaaatgatcacactgggctgcagcaatctgtgaaactctgaaataatctgcaaatcggagcatttttcctaaccgagttcatagtttgcatcagattgtcaatggcttctatgctcctataaagtttaaaaagctgttggttctgtggatttggctaagtgggcatggcctataggcagaacggatgcttttaagtaccttctgtcctgttaacttctgctagtttagttgctgccccttcctttaccagcagggtcgtctcctgccttgactctgtttatgtgtgtcctgtacaaatcacttcacacttgcaaacgtatttttaaccatcagagcctccagttcttcctgagggggtctcataccagagagttgcttggcctattcacaatatgcatgtcacactacacatcaaacttctacacatagggttagatcaggggctttcagtaaacttatttatttactgtgcagtagcatcattgtttcattttttttttctaaaatgatgtattctataacacttcagcaaaacttcagtgtagaaaatggaacttggctctattagatgggaggtctgcaggcatttcaattagtgagttgccaaggagagactgaggggtgtcccctgcaagacagcagggggacagacagcacaggaagacagatggggaagacgcaccctcagggacaagtggtggcagtgcctgtgtttctggagttggttccttctggtgggtttgtggtctcactgacttcaagaatgaagccatggaccttcgtggtgagtgttacagctcttaaaattggcatggacccaaagagtgagcggtagcagggtttattgtaaagagcaaaaaaacaaaacttccgcagcgtggaagggtacccgagcaggttgcggctgctggctggggtggccagcttttattcccttattgccccctcccatgttccatttttgtcctatcagagtgcccttttttcaatcctccctgtgattgggtacttttaggatcctgctgattggtgcattttacagagcgttgattggtgcattttacaatcctcttgctagctacagagcgctgattggtgcattttacaatcctcttgtaagacagaaaagttctccaagtccccacttgacccaggaagtccaactggcttcacctctcacctggactcaaagctcccagccagcccctgttgcccagagcacacatgctgatgacgagggccactgtctgccttcctccacctggggtatttgtcacatggagactgagtcaggttgcattaaggtcagttcagagacctttgctaagagaccaaggcaaaaatacccaagcacatatataacaaggacagaatgaattacagtccaacaaatgtataaatatgttcaggtaggctgggcacggtggctcacgcctgtaatactggcactttaggaggctgaggcaggcagatcacttgaggtcaggagtccaagaccagcctggcctacatggtgaaaccccgtctctactaaaaatacaaaaaattagccaggcatggtggtgcatgcttacaaacccagctacttgggaggctgaggcaggagaatcacttgaacccaggaggcagaggttgcagtgacccagtgacccaagatagcaccattgcactccagcctgggcaacaagagcaaaactccgtcccaaaaaaaaaaaaaaaaaaaaaaaaaaaaagctgggcatggtggctcacgcctgtaatctcagcactttgggaggccgaggtgtgtgaatcacctgaggtcgggagttcgaggccagcttgaccaacatggagaaaccctgtctctactaaaaatacaaaattagtcaggcatggtggcacatgcctgtaatcccagctactcgggaggctgaggcaggagaatcgcttgaacctgggaggtgaaggttgtggtgagccaagattgtgcccagcctgaggaacaagagcaaaaaaatccatctaaaaaaaaaaaaaaaaaagaaagaaaaaaagacatatggccagatggaaagagctgattgatgcatgatatcattgcttggtgatacggctttagaaaagccctataacgttttgaatctcaatttttatctactaaaaaactgatcaatttgaaatattacaactatttaagaatgtgatggggataaagcagataatttctggaaagcaccttagctgtcagagtgaaagactctatgtattagaaagtaatattgaagtcccaaattttcaagccccccgcccaaccctatttccaaggttggagggtggctgagggtggggtgggcagggatcaacattctcaacaggaccacatcatgctacagtgatttttcgttctttcctacccactttgcagtgacacctaaccgtcaaatcctaaagtacattttataacctaaatctgaaatcaaaagctacattctgattaaatccccaggccttgcacaattgttactccatcgatattgtccatatgagtgatttacagaataaatggataaattgtgcctacttcaaaatcatattttataatgagatataataatataccatatagaacacattagattttatctagattcagctcattctcaaaattcaatcctggtttatataattgttgggtaagctctacacagggaggtaaattgaatcactttcatcttcagagaattaggaataccggatcacactcaatatttaggtcatctgtgtttctctcctgtgagtttttgcctgttaccttaacatctggaaaatgtctctcaaacacgttaaatgaagacagtgggagtggcagaaggaagttgaaggggataaaaaagaaggaaacaggaaagaaagaaagaaggagacagagaaagctgaagagagtctagggccacaaagatggaaaacatggtcacaacaaatggaaaaaaaaatctaacatgtccaattcagacttctgcttctagttatttttaagtttcccagttttggtgttaaatttaaactttgtgaggcattctaaaatagctaaacaatacaagaataaacttaaaaattcaatggcataaaaaatatatgtatatgtctctaggtacctcttggtggcctgattgaagttgtcagctcacgttactgttagaagtacaaatgtaataaggaagttgaattataacttgaataattggataaatcactgatcaaacaactctcagtttagcaataatgagggtattgctccaaagcaaccatggaatgtcatttttctggtttcctaatgtcatttgctccctgtgatgaagtctgagaatgagatgagctgaaactgtaaacccatttaaagaaaaacccaactaagcttatttccgctctttttaagccctgtaccttttactggtgattagacttcccttgggggatgatcctaaagacaaggttatcttcacgttattctttgtgggttttatggggaaaggttttttgctgagctgagaatgtgggaacgggataaagaaaccaacaaatgcttagttcaccaaaactttacaaaagcaagtagacaggagttaaataccaaatcagcaagaagaaaggaaaggttcttaataaacatatttcaacactggagtctgtgcccccaccaatgactagattgccactcctggtcttgaaggatggggctgtccttgtgaaaataaaaccacatggtattgtggagaccaaactaagtgataaaattgagttaatggtaaattataggataacattttgaaaaacactgaagggaacaggtgctgggaagaagcacttattatgtgtaatctaaaacacaagacgcgacctagttttgtcgcaggtaactggttattttgggttaaattatttgtacccataaattccctataataatcaacatccttactcagatcagcctggctttgttatagcattcccaggaacataaaaacaaaatatatgcagtgagcaataaaaattttaaaacattcttttgttataaataaactgttaggaaatataatagtgggaccgtgttcttctcttcattctaatatgtgaaaagtctgttaacattacatggtagctgtacattttgctcactcacaagtaaagacttgtcaggaaatcccagggcatcgtgaaaatcactgcttgtccctgaacctgtgccctaccagatgtagcatgagctgcttgatgtatattactttatctaatcctcagagctaccagatgagacaggaattaccccattttacaaaggaagaaagaaaaatttaagagattaagtaatttgtctgtggtccaaagggtttgtaagaggtaaagccaggctttgaacatgagtttgactgtcccccaaactcctgattttcttagtaagccttcattgcctctgtggcaattgataaaaatacccagggatgtgatgtgtgtgtgtgtgtgtgtgtgtgtgtgtgtgtgagagagagagagagagacggagtctcactctgttgccaggctggagtgcaatggcgtgatctccgctcactgcaacctccttctcccaggttcaagcaattctcctgcctcagccccttgagtagctgggattacccgcgcatgcaaccacgcctggctaagttttgtatttttagtggagacgggctttcaccatgttggtcaggctggtctcgaactcctgacctcatgatccaccctcctcaggctcccaaagtgctgggattacaggtgtgagccactgcgcccagcccccagggattctttttaacagaaatgtatgcaaaagggcactggaagcaagaaagaagggatctatggtacttggatgttccgtggaagaaaggacacaggactgttagaggatgcacctcagagaatgtgagtcctgaattatggtgcagtgggtaagagggtaaacgtggagcatcacatcccagattcaaactcagtttgtacatctcattgaggtcgatcttggacaatttacttatccactctgagtcttgatttttttttttatctgtaaaaacagtacactaataataatgaccttatagggttcagtgattaaattagaaaatacttgtcactcatttcacatgcgagaatttttagctataaatagtattattttggaaggataagaaggcattcattggccaggcatgctggctcacgcctgtaatcccagcgcttgggaggctgaggcgggctgatcacctgaggtcaggagtttgagaccagcctggccaacatggtgaaaccccatctctaccaaagaatacaaaaattagctaggcttggtggcacacacctgtagtcccagctactcgggcagctgaagcaggagaatcccttgaacctgggaggcagaggttgcagtgagtggagatcacagcactgcactccagcctgggtgacagagtgaaactctatctcaaaaaaaaaaaaaaggcattcattgggaaaatggacaatctatggagaaataaaacacatgcacaaagttacaggtgcatcccatttcaatggatgccagctaacctgaacattggtaatgctttggggcataaggcagagaacaataggtgctgagagaggagagatatgcaaaggccaggcatggagggctctgtatcatgtgcaaagaggagccagtcattgttttgagctggagcgtgctatcatctggtcagatttattttagaaagcacatcccagcacctgtggggatgatgttttgaagcagcattccagggaaaaagttagaaaagtattgcaatagtttaggcatgggatgataagagcagtggtaccatgaaaataaagaaagagactgaaaggagaaatcctcaagatatagaatcaataacacagtgttccatttgagagaagcagcttgggaagaagaaataataatgctcctaaggtttctggacaatgtcttgtgacaccactattcaaatagaaaattactaggagaggacagtgctttgcagaataaaataataaaaatgttgggttttgtctggagaatttgatgcctttaggatatccagctagtgatcagtaggtagtcagataagagagttagaagctcagtagaaacatcttggctggagttttgctcttttttattttgaagccatataatgtggcacatgtacatttataattattatatctttctagtggattgactgataccattatgtaacaacgtttttaaatgctttttgccttaatttctacttgttctgatttagtataacttccatagctttcttttgattcatatttgcgtgatatgtttttaaacccttttattttcaacttgtctctatcctgaagaatatatttggcttttgtttggctatgcctttctattgaagaatttaatgtgtttatatctgataaaattactaacaatattagttttagatagacctttgtactatttgtgttttgtttgtcccacttctttttgttttcctttaactatcttttctttttaaaattaatcacttttttattactccccttttaaaattattatttatacatcctgtgactcttgtttcagtagttaccttagagattacagtattcaaccttaatatgttagaatctaatttaaagttgatacttttatcatgttataatcaataatcaatccaaggaccttggaacattttaaacccacttacccacttcctgtcttttgtgctatctatgccaagtattttaattctacgtacataataggtacacaaaacatttttattgttttatacaattactaataatgtaaaattacccttgctgttatttttcttttcttcctgaaattctatgcttccatatgggattaatgtatttcttttggaagacctctcttttatgtttctttcattggagatcttctggtaaaaagtgttctttgtttttgtttttcgaaaatgacttgattttcttaaattctgtgggattcttgctctgagtatagagttctaatttggcatttattttcattcaggactttacgatgctattccatcatgctctggcttgtattattttgattaggaagccattgctttctataactggggacccccatccctcccctggtcatctcattgtagagtactgttattgttgctgttgttgttatttaattttattttagccattctggtaggtgtgtattaatatctcatgtgattttaatttaatggtgaacaattttcacgtgcttttcgtcatctatatatctattctctggtgaaatatctatttatatcttttacccattttctaattgaattgtttatttttctattgttgggttttgagagctttttatctattctcaatcaatgatcctttgtcagtatgtggtttgcaaatgttatttcccagtctatatcttgccttttaattttcttgccttatattggcctttcactgaacaaaagtttttaatgttgaagttcaatttatcgactttttcttttatagatcatgtttttgataccaagtctaagaattctttgcctaccccaaggtcccagagattattctggtgttttcttttaaaagttttatgattttacatttttcatttgtgtctatgatccattttgagctcattttggtttagatatgagatttaggtggaagtcagttttttgcctctggatgtccaattgctctagcaccattggttgaaaaggctgtccttccttcattgaattgcattggcacatttgaaaaaaatcagttggacatatttgtataggtctatttctgggttctgtattctattccattgattatgtgtctaactcctcaccaatatcacactgtcttgattactatagctacatggtaagccttaatatcaggtggagtgattcatcccacttcatttttctttgtgaagttgttttagctatttgaaggcctgtgcctttccatataaattttaaaataaaggctgggggcagtgtctcatgcctgtaatcccggagctttgggagaccaaggtgggaggatcccttgaggccaggagttcaagaccagcctggccaataatagcaagaccctgtcttcaccaaaaataacaaaattagccaggcatggtggcatttgcctgtggtcctagctaactgggaggctgaggtaggaggatcccttgagcccaggagttcaaagttgcagtgagctgtgatcacaccactgcactccagtctgggtgacagagcaagcctctatcctaaaaaaacgtaaataaataaaaataaaaataagttaagctttttgatgtttgcagaaaaaccttgctgagatttttataggaattgcattaaatctatccatcaatttggggaaaactgatgtctttactatgttgagttttccaatccatgaacatatatgtatctagacttatttaggccttcttttatttatttcattattttgtaattttcatcacataagcctgtatctgcttcattaagtatatacctaaatatttcatttttttgtaatgattataaatggtattgttttttaattttggtctccacatgttaatggttagtatattaaaatttgattgatttttgtgtattgttcctttatcctgagttcttgctgaactcatatgttagttctaagaatgtttttccatattacttgggattttctgcagctaatagttacttgcaaaagtggaaattttatttcttcctttccagtctctctatatattttttcttgctttattctggcaagaattctaatactacgctgagttagaggggtgtgaaatcaatatcgttgccttgttcctgatcttagggagaaagcgtttagtatttcaccattaattatgctgttagctgtaggtttttgcagatggtttttatcaagtcaagaaatttctcctctattcctagtttgccaagagtttttatcatgaatgtgtgttggattttgtcaaatcctttttcagcatcaactgacatgatcatgtcattttgcttagtaaattatttttttaatttccaagttggaaagaatgattctcataaaatgccctggggctaatgatgtatgcatagagcattttcagtgatatctaaataatgcaagataaattaaaagataacgataaaattttccttctcctaagttctttatacaagtattgctctttttctattaactacagctactgattagcttgctgaaattacctttcttttagtaaattaccattcttttagttttatgattcctaaatattaccagactaaatacacattttaatttagattaagctgggtttcaaattaggataactaaagtgagtcaaattaagtgaagcaactaaaaacaaacaaaacaataaaaaacctcattacaaaaactactaacttttttcttgtaaaacataaatattatacctgaagtattgtacacattggagattagggagtaaaataataaacactgtttacttttagagaaaaagacaaaacaggttcgtctgaaacctagtagaatgtttttacatgaatacactgctttggagcaattgtgtatctgcagctttataaattacagtaaggctgattccaaaaaaggataatgcatttctagccctgcatccctgggtggtagaaaggaagctgtctaggtgtgctcgaatttccctaaggcaccagctttaaatgtctttgtattctgcttcctgtagtttccagtaaagcttccttcagctgcagcctaaagccacagatggcttgctggaaacaggagagggcctgaagtcaagccagtctgtatctgctcgtacagcacactgtgcaccttctcagtagtggtcaaccagagacaggcagagatactatccagacaacctcaggaaaatgtcagccgtatagaatgtgagccacaaaaatgtcaattctccaaataatgatttaaaaatgtatctaactccactgaagccttcgagatgttttatccaagagaatgtaactattttttcccttatcagattgatcttggcttaagcttcactctgaggtttagtcattggaaggtaataattcaggattcggttaccgatttttaattaagtagatttagacctggatctcactccttattatggggttatatttccaatatttctttagccaaaacatgtattttctctgaagaaatggctcttttgtgtgagagagatatttccaattcagggaagaaagagtgacgtttgttcttggacgcagggtgtgtcatcagagagtgactgacacacctgattgatgaggcaggtgctgatggatgagagctgtctaggtggccccaaaatgtgtagtaatgaggaaatgatggattggtgatgctaaacatatcaaggttaagatggcttatacattaaaaaatgcaatttcaaaatatcagtatggtaaatatatatgactttctgatgcgtgggactctattgcatagtcacagaggtcgcccttgtttatattcccccaccattgaaacacagaaagagcaatgtggcaatagctccttttgggaaagaacccttcttttgttaatattgatcattacgttttctcaaagacatatacacttacatttcattttgcatggagcagttttgctatatttaagcactaaagagggggaattagagcaattgctattccctgcactacacaaataactgttcactcatgtaatatgatattcacttcaaatatttgattattttggccaggattatctcatgatatttttctccatgttctttattctgtgtgtatattttgtgaattgaacaatgagctctattatagtttgatagctcaaacaagctattaatattagttgtgtgtattagtctgctattaccatgacagtgctacttaacaaaccatccaaaattcagtgtcttataatgaaagcatttgtttttatcacttatgggtccacggactagcttgcctgcctccgttccaagctgcgggttggctgtagttggctgtaaagttgagtctgggttcaagtctgctccacatgaatccactttttctttgaaccagcagttactcagcacatgatatcttagtggatcacaggagcacaaagtcctagacaacaataaaaacaagaacaaaacgtaagcacgtttaaggcctctggctgcttcatgaccactaacactcattctaaagcaagtcgtagggctaagcctaacatcaagtgcacagaaaaatatactctccattttagtgcagtgcaaagagagatactgaagaattaaaaatcagccagttaagctgggcatggtggcatgcacctgtaatcccagctattcaagaggctgaggtggaaggatttgcttgaccccaagaatacgagaccagcctgggcatcatagcaagtcctcatctagaagaaaggaaggaaggaaggaaggaagggaaggagggagggaggggaggggaggggaggagagaggaggggaggggaggggaagagagatagagagaaagagagagagagaaagagagagagagaaaaaaggaaaggaaaggaagaaaaaagaaggagtgagggaggaagagaggaagggagggagggagggaggaaggaaggaaggaaggaaggaaaggagggaggatggatcagccaatttaccactcaatccatggcaaacacatcagtgatttaaggatgcttgttctggggttccctggaatgtgggtgtgctgctttatggcattagtcatagcagtagtactacataataagtgtgtgtaatggcattcactgggcccaagtacaattgccatcttgcccttatgaacttattagtaacagttaataaacaagtagtgataaatatagcttgaatgtttaaaaataacatttagtttttgaagctgatgattaatagaataatgcccagcaacagcattttcctgtctacctacctccaactcttcagtgctcctacctgcagccctcaccacagcaatgtcctttcacctggtctcatctccttcagtctcgttcccttgcatgtaaaatgctggttctggatcaatttttagatcagacttgattagcaagtgcatcctgattctaccacttatttgattaaaaatctttcaactgaatcccattagccaaagaacacagtctgacagccaaactctgtataatccagcattgaaggccctctgtagaagaccccatcctgttttcccaatcctaattctcattattctccttcatgtgccctattcttttctcagagttatgcttgcccatgcatataatgtaaattcttgcccatttagccttggatcaagagattctttcaggctggaattgccaatgccaattccatttctacatggttttattctatttatgcttcaagacccagatccaaatcacctcctccttggaacagttgagatcctcatagcccaaagtaatcttcatctttttgcaaaactgtaagacgtttctgcctcttttactgaacctatcattttctaaattgcgtcatcattatttatctatgtcttactactaatggactatcacttatctttttctacttaaatactaaatatactttcttgaatattgaaacaatatgtaataaataaatttatcaatccattcataccctcagtcatcgttcttctgtgctacgcatgccaataagcttaagtggtttccttaagtaacagtcagttcacactggaatcaaagctgctcaaactccacaaactccaaccctctcttgagtttgcaggcccatttcagattagcagaatcattagcaacatgtggtgaagcactgcgtattgcttacgtttcagaataattttgtcctatatgacctctgtgaatatatcagggactgggcctttggaagcatttcaactttgggaaatgtctgactatgcaaatactctatagtttcgcctgacttagaagctatggacaggccaagcctgacctactaagtaatgtgcctgtaacaaaaatcaccctgcacgtttgctatctatccattggatttacagacagggttcaggagagccaccattgttcatgtttactgccaaggtccaagtacaaaatcttagcaccccctaatgttgaaagcagtcttttcaccgtgagcagaaaatggaatgagaaaaatagactgaaggccaatcccagcgaagtttaactttggaactagccatgacctatatttgtgtagaatacaagctttatagacattaatttcagcaccagtttaatccctgttcctactagggctattttgagcttatttcaccatttctttcaaaattgtcaataaattgttcatccctttatgctcttcttaaatcatttctgagctgtctgcttaggccatggagtagacaaaactaaatcttatgttctgaggattgtttttttgtattcttttatggtagaccgtttaatcatcttgagattattctttatctctcctttgtatttttattctgaattataaaatttttatctgaaagaaggcctttttcttctataaagattttttcctttagcttctcatgttttggaaaagaaaaagttaaatatagagtgtggctgaatataaactggactgcagtgttaaatgcctctcagcctctttctatcacactgtgtaaataaaagatttgttggcagcaattttcttggtttgttgggtaaattcttcataaattcagttttcagtctgacagtgttcatgaaagcggaacataaaagtaaaacatatgcacattttccaccagctttattatgcaaagtacttgattttgtataaaactggatttttcaaggccaggaaaatcttcaataaatcacatcagcaatcccaaaaacgtctgtagaaccctatgtgttttcccacttctttcagcaactccgtgaataagaaggagacacctgaaggctctgctatggaagcaaagagcgagggaggcaaagatagagtgaggaagggaaagatagactgagggaggcaaagatagagtgagggagggaaagatagagggagggagggagggaaagatagagggagggatggaaagatagagtgagggagggaaagatggagggagggaaagatagagtgagggaggcaaagatagagggagggagggaaagatagagggagggagggaaagatggagggagggatggaaagatggagggagggaaagatagagtgaggaagggaaagatggagggagggagggaaagatagagggagggatggaaagatggagggagggaaagatagagtgaggaagggaaagatagagggagggagggagggaaagatagagggagggagggaaagatagagtgagggagggaaagatggagggagggaaagatggagggagggagggaaagatagagggagggagggaaagatgatggagggagggaaagatggagggagggaaagatagagggagggagggaaagatagagtgagggaggcaaagatagagggagggagggaaagatagagggagggagggaaagattgagggagggaaagatggagggagggaaagatagagggagggagggaaagatagagtcagggagggaaagatggagggagggaaagatagagggagagagggaaagagagtgagggagggaaagacagagtgagggagggaaatatagagggagggagggaaagatggagggagagagggaaagagagtgagggagggaaagacagagtgagggagggaaagatagagggagggagggaaagatggagggaaggaaagatagagggagggagggaaagatagagtgagggagggaaagatagagggagggaaggagggagagatggggcgggtggggggaaggaagaaagaaaagaaaagagggagggaggaaaggagggagcccaggagggaatgatctgatcatgttctcagagtgtgacagaaaatggaaactatgttctttttaaaaaccctccatgtacaatgtaaggtcggttctgtttggtctgcatagtgatgtctttgttttaatgcagggcctcagcaaggatgtggtggttatctgacaggctcgaataatacctttgcctctcctgattctgattcgaatggaatgtatgacaagaatttaaactgtgtatggatcataattgcacctgtaaacaaagtaattcacctcaccttcaatacatttgctctggaggcagcaagtactaggcaaagatgcctttatgattatgtaaaggtaaggctgttttatttttttaacagagtctattcatcccagactctaatatagtgtattccagtttatatcgttacaggaagtcctgctaattttgagtacaggtgctactgctttttaaaatgaccttttcttcagtgatgctacatttaatattatagatgctctatcttcatatcaaattaatctttaatatgggtgactcaaatattttgtgtgactggcttccaacattagcatttaaatctcctattcatcaatgtcttgcaaaagacgatctataggaaggtcggttttctggagagagatactcaaaggacctttggcaaatcctaaaataaacaatgtcagtgacacaaataatcacctcttaatttgtctatttcttaggcttatagatttgcttatcacattatgtttagatattaaaatggttctgaaatcccattaaaagtaaataaaggctgggcactgtggctcatgcctgtaattccagcaatttgggacaccgaggcaggaggatcacttgaggccaggagtttgagaccagcctggccaacatggtgaaaccctgtttctactaaagacacaaaaaattagccgggtgtggcggcgggcgcctgtagtcccagctgctccagaggctgaggcaggagaatcgcttgaacccgggaggtggaggttgcagtgagctgagatctcgccactgcactctagcctgggtagcagagcaagactccgtctcaaaaataaataaataaataaaataaaaaagtaaatcaagaaacttctgttcaatttttaatgactttaatattaaattattatacctatcaggttatataggttcagattacaagtgttaagtagcatcaatcagtatttactactgcactctcaggggaaaaataaaaagtatggcaagatttgtatttatgaggagcttaagtctgattagaaaattatgggatgacacatgcaaattaagaatgcatagttcaggatagtcagcatttaagcgctaatgaatgcattcgatgcaggcttgaagcaatgtgcaagcttagaaggaaagaaagttcatgaaactcgtgtgatcaagaatgacttgatagagcgagggaaaacttactcaggtcaggagagaattcaggcaaggtgaacattttcaaaaaggcataggaattgatacgtgcatgttctcgaaagcgtaaagaggctggctgtgttgaagcagaatagtgctaaagagtagcaagaaataagatggcctacatagagaaataccgagattacaaaggatcctgaaagtcaaactaatgactttagactctgtgcgggtgaaaataaggagtggttgaaggttttccaatgagtgaggtgacaacagcagtagctagggaagactaacctgaaatcagcagctgtgggaactggaaggagaggaggctgggagggctccagagagaggtccctcctaggtgagaaggtcagtcttagacctggatcaggggtgcagccatggcggtgatggcaagaggggtgcaagagaaacttaagttctaggattgcaataaactttagagaaaataattttaaaagaaaaggaaggaaaatttgtggagggaatacccatttgagcacttagttacatgcttttgtttttactatgaaaggggctaaggttgggaggccagaaaaataacagtgtggtttggtgagagcaagacagacaagtgagactgcagtgggcagagaatggaacggggctccggtgagaagacagctccacgaatagagaggacacagcaaagagccttccttccatcaggagaaaggatgctttcttagagggagtcagcatagatttcagagagtcaggctctcagctccaggaaaagtacccagggaggcaactggagaaggcaaaaggcacaggaaaagaacagacgcgtcatgaaaagataaatgtgaagaccaggaatagtgtagtatccctgaagtcaaggggcagggggattcttttacaaagcatgggtggtcaatactattgaattgtaaagtagaggccaagaaagggaaagatgaagaacagcctcattgcactggatgacaaccatttaaataaagtattggcacagaagctggatcagaggagttcatgaaagactaaagatagcaaggaatgtcaattccagtttaattctcctttcctaaaatgagacctggccggccgagtgcggtgactcacgtctgtaatcccagcacactgggaggcagaggtaggcagattgcttgagctcagaagtttgagacaagccctggcaacatagtgagaacccgtctctacaaaaaatacaaaacaattatctgggtgtggtgctgtgcacctacggtaccagcttctcgggagactgaggtggaaggatcccctgaacccagaaggtataagctgcagtcagtcgtgattgcatcactgcacaccagcctgggcaacagagtgagatactttcgccaaaaaaaaaaaaaaaaaaaaaaaaaaaaggctgggagagaccaaaatgactagagcagtcctaaagctgaattcaaaactgtttgagagctctcctggctttacagaaaggtaataaggtttagagacggagagtatggggactctaacccaattttgctgtcagacaaatttcctaatctccccgattcctcatcatttcgtcaatttttctttaaatcacataatagtacctactgtgaaaggcagttttgaggattgaaattatgtgtactagagcgtttagcactgtgcctgacataaattgtaaacaaatttacctccctttttttccccgttggagtaattccaaataggcatgggcactatggaatttctttttcttaaaaactaaaaataatggatttgcatataaaattacaattttaaattcttatagaatgatttgagtatggccctgctaggagagttgactggatttactctcaagatccatttttatggagtgtgatttgataatgtcatcaaaacagcctgtcattgtctgaatttccgcaattcattcaggccagaaactgcaatatcaaaaacaaggagttattttcttgcttcaaaataaaatatcgtttttttcaaataaattctgttcagaactattcttgttttcccccttggaaaagcaatttccttccattggcaacgtttccaactaccactaaactggcagatcaaagaatagcccttggaatgtggagcttggagctttctttattaaagagatttttctgtgataaatgggacggttgattccttttagatttttttttagagattataatcaaatcactttttagaaaagctaatttaactgaactctgtggtagatacacaagtaaaatcataccaattccattattcattcataattctatcatgatcgtttgtgaaagggttgacttggagagtaattacggtaactgaatcacgtagtgaattgtgcatgtcactgagcagtctcttttgaaatccacatcgcatccattgcaggagttagttggcaagggtatgtgccaggccctgtaccagcatcactggagatgtagagagttaaagacatctcttgaagagttcaagcttcttgaggagctgctagtaaagtgtaggagactgacatgtaaacaaaaaacatacatttaaataattacatttaaagtacaaataaaatacatttttttttttagttggagtcttgctgttttgcccaggctggactgcagtggtgctgtcttgcccaggctggactgcagtggtgctatctcggctcactgcaggctctgtctcccgggttcacgccattctcctgcctcagcctcctgagtagctgggactacaggcgcccgccaccacacccagctaattttttgtatttttagtagagatgaagtttcactgtgttagccaagatggtctcgatgtcctgaccttgggatccgcccgcctcggcctcccaaagtgctgggattacaggcatgagccaccacgcccggccaaacacatttaaataacggacatttttttcacattgtataacgtgttgcataacatgacaaaaatcataaatagaaacaacatagaagggcagagcagaagaggctctgattggctttgttttggctaggaaaggctttctagagggtgatggctgagctggaatttacaaaatgaacagaaactcactcccttttgttatcctttacgaaactgagaggagcatgaacctagctgactttttctgccaggaagtatggaaccagcagagagaggtcctcatcctaacattgcccagtttttcctcaaccccatccgtgccccttttctttttctttttcttttctttttttttttttgagacagagtttctatcttgtcacccaggctcgagtgcaatggtgtgatattggcttactgcaacctctgcctcccgaattcaagtgattctcctgcctcggcctcccaagttgctgggattacagacatgcaccaccatgcccagctaatttttgtatttttagtagagacggggtttcaccatgttggccaggcttgtctcgaactcctgaccttaggtgatccacctaccttggcctcccaaagtgctgggattacaggtgtcactgccccttttcatagccaatattttgtaatccttcctttcccacctgaagtgaatgtcatctatgctataacctacccataatgtaatttcagaaaatcactgtactatcccaaaggcaatgaaaaggagaaataaaaggaaagtatataaaatagtgtgtcttcgtatatgtaaatactctaacactgctacacaaagtcacataataaaatagattccttttatatgtagaatggtggtgaataaaaagtataaatgtaaacaaatacgggtgggttatatttgcaacccgcatgccaatagcagcatcaccatctgcaagataagtttccagaatggtggaaaaactcaaaacaaacatttctaaaccaaacaaagtacagtcttccctcagcttacacaataattgcatttctggaaatttggtgcatatcaaaactgtgcaaaaatatttttgtgtttatatataaaatggacttaggttctgggatcaaataattataaacaagtttttttttacacaaatgtctgacaggacattcaaaagttatgtgggacaaaaatcttcactttgcaaaactgtcctgtgaattactaaatgccagttataggcccaaattatagtgatgacccaaaaaccaccacacttgtgcaaaacactccctatggggtggtattgacctcattgagaaggtctgacttaatgcaccgggcttaaccattcagtctgtgtcagacactggagctgaggaggggctgtccatctttggggagaggatcagcagtctatggaaggcatcacgttcctatccacatgaggtcgtacctactattcattcattctttcattcagttcagtgttaattagcatacctactatattctagacattgctgcaagaactagagaagaacattgagattttagaaaacaatactaggaaaactcctgctcttgtagagctgattctaatcattgcttctttgtggctttttcccagacatctgggactagtataacttttttctccagaagattctgaaatgggtcagagtttagccccaaactggaaaagtcactctctattcttcttcccatactaaattatgccctggcatgttgcccagcagacctcatcagaggttctgcaataagatcaaagaattcatgaagatactctaagattctgctcccagtaagaatatcaaaatcctcttgtgatcaaattcccaggaaaatattaaaagataaagtcctaaggatattaatgtatgaaattattacctttgaaaagaattgtagtccaatatcaaagtctattgcccttgtgcattaaaagttcatagaaattaaaatccaaaaattttctttcccagtttttctaactgctcaagtcaatagctgggtgaaatgtgggattttgccgtggttgtagcagagcctgcctgccactaagttatttgtacaatgccttcaggatctttagcagattctaaaatgatcagatttctaaaagttgagaaaatataacattcttctcagcacttacccacatccacaagacttagaacgtaattcaagctccaggtccatcgcagttgtgccaggaaatgtttgctcccagaatgtggcccgtagctgcgtataatggtgtagatcctaaaggcaccatttatatcccagtttatatatgattccccctcctcatcattggatagggcgtcccctgcaacgcattgtagggcaacctggcaaaagtctgtagtgaaggtttagtgttatcagagaacaagagagcagatagagatcttgggtttgaggcagaggagtttagagcctcctatgtcagttatcccgaggccacaagctatttcaactcacttaggagaaatcttactgtggcaatgaatgaactaacacaagaccagcttggggccaggtatgtatgtcatttccttccatccagccctggcttctgcctcctaccttccttcacatttaccagttatccatttaaaacccaaatctgatcttacatcacgtaggatcagatccagactccttggatgaaatgtatggaacttcacagctttgtttgttggacttcgtcatttctcctgttctctcaccctggcctccagggccaatgaagggggtcagaagttgttgacacgtgccatgcatttcacacttccatggcctggcatttattactgtctggctgggatacccttcctgttttgtaggtctggaaggtctttttttttttttttggggacagagtttcgctcttgtcgcccaggctggaatgcagtggtgcgatcttggctcactgcaacctctgcctcccgggttcaagcaattctcctgcctcagcctcccaagtagctgggattacaggcctgcgccaccacatctggctaatttcgtatttttaatagagatggggtttctccattttggtcaggctggtctcgaactcctgacctcaggcgatccgcctgcctcggcctcccaaagtgctgggattacaggaatgagccaccacgccccgcaggtctggaaggtctctacttacatttaagggccaacccaaatgtctgtctccatcacgtgggttctcatgatacactcccattattttattgtagcacttatttttctctattttgtatataatttatatacacatatatttatgtgtatgcatagtgtatgtgcatattacacaaatatatgtatttgtatatttaatttgtagacctttactctcctttgttcatgaaggggtcttatgtcttgaagatctggaaagggctttacatgtccttgtatgcctgggatctagcacagaggcctggcatacaggtcccagaataaaaatgcttgctaatataaatgtgatcataaagacagcaatgattatcatgaaattttaacttgtttaccagaaaaagtgcatgacctaaaacttggcaaatgtgctcttccatgaaacaaaggggtgaagattagaaaactcgagtttcatctgattctgaattaactaaaatcatgtttaagttggaaagacagtgccatctagtggtgcatttctttttcttttacaatgactggttttagtcattcctgtcttacataatcctagcactttagaataatgtcagtggtcatggtcatggctgttctgaggccttgaacacatagctctgttatgaattgaatatttggagttagatacacacagacactcattttagaagtacaatggagattactcagaagaaaacattttctagttatgtgtttcagggaaatccaagcacccactatttcgatggatgtttctagaagggagccatggttgggaattgttctgggtgctggcgacaccacagtgaagaagtcagacagagtctctgtctccccacacgtgggacttacatccttgttgggaaagagaccggacaaagtaaataaacaataaataagatcagttttgattataataggaaaataaaacaggatgatgctatgggagggcaacattcaatagcattggcttctctgaggaggtgacatgtcaggtgagggcccatgacagggagtccttagctgtgtgggttcagcttcacctgaggaaggaagagcagcaggaacagggctgtggacaggagtcctcctgggatgaaggaagtgcagctagcagtgaggtgtgggcagcctgggaaggaggcacaggccagagcagctggggcttgcagactgtgggagggagctggaattttactttaggtgcaatggggatctgccgaagcattttagacagagcaggagcatcacctcattggagtttgcagacatgcaggcagttcagtggagaacactatggctgctccggaattaggcctattaagaagatgtttcagtgggaacaggtgaaggacgatggagatcacctggagatggagccctctgggatatattttgaaggtagattggagtagttgtggagtgaagagagagagagaggaatcagagatgactaaagttgtaggcttgaaacattgaggtaaagatggctctgggagaacagttttgggagggctagtgggacagaggaatcaaagcacttgtttatttatttattagatatttattgagagcctctcacgtgcagacacttttctaaaaactgggaacatggcagtgagcagaaaagaaatctgtacattcatggaacttgtattgtcttcagagagaaagccaatgaaataagcaagtttagcctggacaacataggaagaccccatctctaaaaattttttttaattagctaggcatggtggcatgcacctgtagtcccaggtacttgggaggctgaggtgggaggatcacttgagcccagaagttcaaggttgcagtgagctatgattgcagcactgcactccagcctgggcaacagcgtgagaccttatttcaaaaaaaaaaaaagctaaatatgtagtatatagaagaaggtaacagttgctgtggagaaaaatcaagcaggaaaggagatgggaatgttgggagagtttacatctggaaggccttattgagttggggatatcttttttttttttttttttttgagacagtcttgcactgtcacccaggctggagtgtagtggcaccatctcagctcactgtaacctccacctcctagattcaagttattctcctgcctcagcctcccaagtatatgggattacaggggtgtaccaccacgcccggccgagttggggatatgtgagtaaagacctgaagaaatgcacgaggacaaactatgtggatatacagggaagagcattccaggcaaagtgaacagcaaatgccatacccaagaagcagcaacacacctggtttggctcaagaagcggaatcgaacaaagtgaagacaataagaaattagattagaaaggtcaggggtgggagaggagagaaagccattgtgatgcctttggctgtttgattgagtggatgggaagcagttaggaggatttcagcagagcagtgacatggtgtgacttacattttaacagtatcctctcgatgacattttgaggatacactaaagaggaacacgagcagaatcaggggcttcatgggaggctgcagtgatcatctaggcaagagatcagagcagttggggccatagtgtgagtcggtgcagaggttaaagtagcagtgggtgagcggactctcataacaccttcttttaaaaatcatatatttcccaaagaggaaaaaaatgttaggcgtcataacaggtttttcctgaaagtcataatataatcaatccaattataattctgttcctaaattaagactacctctaagaaaatcaatgtaaaaatgtttaccgtgacctattgcaacttcgcgtccaatttagtgtgaaatatgcaattttttgtaagtaatggagaagtaatgaattgtttttcttctcagttatatgatggggatagtgaaaatgcgaacttggctggaacgttttgtggttccacagtacctgctccttttatctcttctggtaacttccttacggttcaattcatcagtgacttaacattagagagggaaggatttaatgctacatacaccatcatggacagtgagtaaatagaagcatttttatatgttatgaaatacacatgtatttatgcactgaaaagaatgccctgcttattatatcgaaatttcaatgttaattactaaactcaatgtcaattactatctaaactcaatgtcaattgctaaacaccatgttaattactgtatgtttaatctgtggtacaaatttgatacaatctttagtcaaggatataaaccctgaattcttaatagagtaatgaaaatatagctcctccggggtgggaggcagggaagacagaattgcaaagattgcctgagatgagacatgaataaaatgtctcctgtgttgctttttcctccctctccagtgccttgtggtggaacatacaatgcaacttggaccccacaaaatatttcatcacccaattcatcagacccagatgtcccattttccatctgtacttgggtcattgattcccctccgcatcagcaggtcaagataactgtgtgggcattacagctgacctcgcaagactgcacgcagaattacttacagcttcaggactcaccgcaggtaacaattataagatgaatggcagtcacatctagtgaccttttcaccagtatttgcaaaacacttgaagtaatgaagccatgatgaaataattttcttttttttaattatactttaagttttagggtacatgcgcacaatgtgcaagtttgttacatatgtatacatgtgccatgttggtgtgctgcacccattaactcgtcatttaacattaggtatatctcctaatgctatccctcccccctcccctcttcccccaccccacaacaggccccggtgtgtgatgttccccttcctgtgtccatgtgttccgattgttcaattcccacctatgagtgagaatatgcggtgtttggttttttgtccttgcgatagtttgctgagaatgatggtttctagcttcatccatgtccctacaaaggacatgacctcatcattttttatggctgcatagtattccatggtgtgtatgtgccacattttcttaatccggtctatcattgttggacatttgggatggttccaagtctttgctattgtgaatagtgccgcaataaacatacgtgtgcatgtgtctttatagcagcatgatttataatcctttgggtatatacccagtaatgggatggctggatcaaatggtatttctagttctagatccctaaggaatcaccacactgacttccacaatggttgaactagtttacagttccaccaacagtgtcaaagcgttcctatttctccacatcctctccagcacctgttgtttcctgactttttaacaatcaccattctaactggtgtgagatggtatctcattgtggttttgatttgcatttctctgatggctagtgatgatgagcattttttcatgtgtcttttggctgcataaatgtcttcttttgagaagtgtctgttcatatccttcgcccactttttgatggagtggtttgtttcatgatgaaataattttctaagttacttccagcttaatgtgtttttcatccatacacaaagccctccaatcaggtgtgtcgagaaacttgaacttggtcctgcaggtccagagctctcaaagcttcatgtgcctaagaatgcattaagatgcatcttaaaagtgcatcctccctggcccaccctcagagaccgaatcccccatataacacccatttatctgaatttttgacaaacacctctggtgttttggtgccagtaccagaactccatggaccatgcttggagaaatacctctagttagtgggatttatgtataggttgaattgaaagggtcagtacagaacacaagagaatcagtgaagaggctgtttggcactagtctgataggtttatattcatggtaatataagagagataaaaagaaaagggctgggtgtggtggctcatgcttataatcccagcactttgggaggccaaggctggtggattacctgaggtcaggagttcaagatcagcctggccagtgtggtgaaaccctgcctctactgaaaatacaaaaaattagctgggtgcagtggtgtgcgcttgtaatcccagctactcaggaggctgaggtaggagaatcgcttgaacctgggaagcagaggttgcagtgagccaagatcgcgccactgcactccagcctgggtgacagagtgagacttcgtctcaacaacaacaacaacaaaatccattttgagctttaaaaaaggctgagtctgaatttcctctggaataagatgttgaggagacagttggacacaaagtgggttgttgaccaaaggcccaaagatttttgtgcatcatcattatcatgataggtaattgaaaaatgagaagaatgagattatctggggaaaatatgcaaagggattggccacgaactgaggatggataccaggagaacatctgagaatacctggattgtctttctgcagtttggggagcaactaaccctccccagttcattccagtaaaatgtcatggtcaaagccccatatgctggactagtagagtatctgttgtcttctgagttttcagggtccccttcattataaatctggggtcccctgcttctcatgtggtcttgctggggaaagaaaagtccaggttgtgtgactccagagtggagaggcgtgagatgtgctggcagctgaatagaccctggacttgctgagtttggtgcaaagcatatatgctgagatgagctcccaaggtggacaagatgctagattatcgtcattccattggtaatggttttcaggacaaaatctctattacccattggtaccctagaggacttacagccaagtggaacaggccctttgggtgaaagctctctcaattttccctggcttcacgaagctaagacaatggggatcagggtggaccactcagcggggcacagaatggcactttcagggcacgagacaccgtctgaaacataacagcagctggagcagcctcgagtaagacccagtgtttgtcatgactgaataatgttttccactgaatgaatacaggaaacaatcaagggtttcggactgggtaggtagggaggaaagacaaacattgacggatgagctgggagaaactgggattctcggggtatccaagagtagacagagcagccctaattggcagatcatgaaggaatgatgtgtagggtggttacggaggatgttcagtggttagctggcactggagatgaacagagatgcagagatagaaggccctaaggttaagaaatatgaagttgagggtgtttaatggcttgtctataaaaacacagaaacctctaaagggttcagaaaggaaatcaggggcaggagatgactatgagctgagacacctcaagtctttcataaatgaagggaagtaactgggagaaaagtaaatgagagtgacgataatggtaagaatatctttggccagatgtagagaccgtcgaaggagaaccagctttgagacgaggatggaagctgcagtgaggaatgtggagcctccctcccttcccccgaggctggccccccacccttcccactcaatgaactgtggagcatgggtaaagaacagcctctaccaggaggctgctggagaaccaggttttgctaaggccacaaagtggaaaggtgggggatgtataccgagaatgactgacagtgcagttaaagttcacaggatacagcaaagttagacaaggaccaagagcaggagacagtggggaagaggggtggaagccccgagcagttacaggagttttgcaagcagagacgggtggggtgtttcagtaggttcctaagaactgcagatattagagacattcctgtgacagggaggctgcaaataccctgactttggtacaacttgtttttacccaagaactgatgggcattcgactgcatttactccaggcttttgagaggtgatgagggctgccctagtgttacaaaggggaaccggtacctcatgacaggccccggctggcttgggggatgtacagtggaaccaaaggctctgattagatttgctaaggggtagcaagggctggatcagggtgatggtggttgttagtcccatggagctcaggacaatggcaaaagccccaggaggagagatccagtgagctctcaaacagcctagatcctcagagcaatggcacaggcctcagctaggaagttgcataaaaggcgagggatcttattttcagcagggaaatgtctgtggtttcagcagaagctttgcctcccttcctcctgcccctctgggaaggtgcaacttgcatcaattccaaggccaacgtgagtcttcttgcagagcacttccaacagcagagctggtttccatggctaaatatttacaccatgcttttatatgcagtctaatttctgttatggcctgttctcttctaagactaaatctaacatgatttggctcccatttcatttcagggtcacggaaattcaagatttcagttctgtggcagaaatgcttcggctgtgccagtgttttattcttctatgagtactgcaatggtcattttcaaatctggagttgtaaacagaaactctagaatgagtttcacctatcagattgcaggtgaggccaggaacttcatcttttattcaaaaaagctgccatcattaccattattcgtagaataattacaattatttctagaattgactcctgtgagtaaattaggatttgttaacaaaaaccacatccctctcttaactagaacccagcccaatttagcaaattactacagttggtttctaaagagataaagagaatataatactatccaggatggttagaatgctagcattttcttcaaagtatatgtagttgattttaaaaatatgccaattatcttattaattatacacttaaccacattgaatatacatttttatttacaagaaatatatatgtttatttacaaaagctttatcaaaatataattctcatatcatacaatttacccatttaaagtttatatttcagaggtttttagtattttcacaaaattgaaaatcttagaaaattattttgtaaaaatcaaaaagccttgaaagagttacctgattattataagaagtttattttcacagaacactttatttagtacttattttgaattgactcaaatgaaagcttcctttggttaaaacaaacgaaagtacttttggtatttttttaccaaaaaaaaaaaaaaggtaaataacgatttgccacaaataactcaacaatggatttaaaatccttgtgcaaaactctgtcttggaggtagcatccttgtcgaaaagagagtctgaatgctacttccacctcaacgtgatcagaaaagttcaaaggatgctcgagtattcgtctttaaaggagaagcctcctgtgtcatgcttcctgtaggcgtgtttgtgtgaacgagctgttgcattgcacctgtgtgtgctgcttgagcaattcacttcactgctcagggtctcaattatctcaaaggtaaacgaagaagctggattacttttttctaaagtttatcaaatgcaatgatctttttgaatgattcctgtgaagttgaaagagcactaaatattggaatgcgtacattaattatgcctatttttcctctaagattgcaacagagactatcacaaggcatttggcaacctgagaagccctggatggccagataactacgacaatgacaaggattgcaccgttactctcacagccccccagaaccacaccatttccctcttttttcattcacttggcatcgagaactcagttgaatgcagaaacgatttcttggaggtgatatgcatttgaatatcgtttgaatgaattatttaaaagatggtggatcacttaagattttacaccttttatctagtgctgctaatattatatgattcttatttgtttcattaatttattcattaccctttcattccctaaacatctacagagcaccagtccaaacaccggaaattgggaaccttagggcccgcaggagactcctagtctggcaggaaggacagatggggtatagccaattacagcacaatgtggaaaggactaactgagtccagcatgggttggggttcctaactcagtctgggaactagaaggctcaagagggcaatatgtaagttgagacctaaaaggatcagagggaagtctaaggacaacatgctggttctgtaaaatgaagctcaatgatactaaatagctcacctaattttcctgacagctacagtaagtttggggcatcgtcaacatcctctaaagacaagtgtttccttgaataaatgctccctggtctcaggggggtgtggtctgtcctttcttcaccacaactccagagcttgaatttgggcacagaaatgacttcactgtttgcccatcgtccacacacccaccccccactcccaccccaggacacactgagagagaagcccccttgtgcctggagcaggcagaaccatgcgcctcgtgggcctgaaactttggggtcctccagtgcccccgatgagctccctctgtgctctttctgccccatcgctgcattgggcatatgagatggaacatgaacatcatcgctcataggcaggagatagtctgaataagcctcatgtgatgtggacccagtgtgtggaactcagcccctgtgttttgccagaaaaaccccagagctcacggggtttgagctttgcaagctctgtcgaaaatgcattcatccttaggaaatatacttaggtggaacctaaaaaccaagagcataaagatgctgagttcctctgtgagtggagtttaaatctaaacctcatcctgaccgtctctaaactggctttgtaccacacaagagtcttcagtaaagtttccaaaaagtgtgcttgttcctctacccctgatctggagttgtattttttattttattttttttctcactgcctctttaatcaggtcttcattcaaaataagctgcccaagaggatttgacctttgtagcataaagaaatgtaccggtgtaggcagcgggctcctttcattctgtgggacgattctttctagcgggcctctgctcagctgatagtttcttggtagcttcagcctttgttcccaacaaaacatcttctgcttcttagcaccaagggctttctttctttcttttctttcttcttctttcttttctgccctgcaacccccctcatccgatttggctcctagggctgctggcaccttctgcccagcctggccaggaagggtgttctggcatatggtctttgcatatgggtttagcttcaacatgattcctgatgcggagttttatcatcctggaaagctctcccctttggaattcatctaaatcctttattaatcaataaccttaacatatagtgccataaataacactcggaggaagctcatgccttttctaaaggaatactcgccacgacaggagaccgaaagatgtatatagcagggaggaaatgaagaggcaaatacagttattctttgtgccggtcaggttattcaacttggacctgtgtacctcccccaccatggagatccaaatatttatatgaagtgtaaagcagaaagaatgaggagagtgggatctggaggaaagatggaataatcccgttaggttggagtcacagtgcaactaactcttaactcactccagcttgaatggaccattattgatcagagtcaacgtttgccatttgcctgatagatgctgggaagcaaagccttgctttccagccgtggagagtgagaattcctcctcctagctgtccttcattactccacagaatggatctgaaacttcctgtcccataagcaaagaaaggaaaccaccgcttaggcctgtaaaatgtagctccatctggctctcagtgggaaggctgtgggcatagtttcttggcagctgtaccaggaagcctcagcattccgttcttgtgaactgcggtgggaacggaaatgtctgactgagaattctgactgtgttactaccaagcgagggccgagctctagaccatgcttggaatctgttttcatgccttcacctcccctttcaagatcctctgatgtcccagagatgcccactgctctaggtggccccattcttcctaggagaggaaagtgaataagacaagttgtcagcagtgtcagtggaaattagtatcctgctgctcctctcagagcaacggcattttgaaagaggaccctgagggaaaaacgcccaaactcaaaagcgtggtgctggctatggcagccctcccatctactagtggatgactggctactctgtcatggcaaggttactttgtttaaacacttagcagaataatccccaaagcactagaaaggcattattctctcccatgggctactacatcgacctaaaaggaatctcacctgatcaacacagcccagcaagatgtcttaactttgtgacttaagataccagcaattaaccaaagtttaaaccatggaattatatagggaacagaggaacttccaatattttgaatacatagatcagtaaaatcagcatttccgcatgtcaggctggttccaacatacattgcccgcgtaacgtttccgtaagaagcgtcgagagccctcctggaagcagggctggttgtgaatgcagggtagcagccaggctgggggacagaaagtggttcagttcacagtgtagttctctctccccataaaacacaggctcatctcctgtttttatatgtgtctactcaaaaatgagttgaaacaaaaaagcaacaaggcctcggaatgtgtttgtaaaacacatttaacaacagacattgtatagatttataattctgtcctttgcccatacagaaattcctttcgttctgaactttattatactttgcattgtattttttcatagcctctttacagccaagtaattttcaatgggaaacacgtgcacacacacacatacacaaacacacacacaatgagaaaggtgtaatagttgactggaagcagagcaggcaacattgcccccgcccatctccaccttttaaaaattcactttacctacattctccagaatgtttccccaaaagcaaaggctgcaggatcacagcacaaactacggtataaaaaagctgcctggtgttttaattgctgtaggttaacaggtatttctgaatccaaatgcaaatgttttttgatctacacgtggaacatttttcccctttgcaagtgaaggtgacttctgcatgtattttcagaaaacgcttcattcttaactgtataaaaagacaaagcttttccgaccaatgtcatcattcaaattgtctccattttaatgtatataccttagagaagaaagtgtaagtttaataatgaatgactccttcctaaaggtgagaaatggaagtaacagcaattcaccattactgggcaagtactgtggaactctgctgccaaaccctgtcttctctcaaaataatgaactatacctacgatttaagagtgatagtgtaacttctgatcgtggatatgaaatcatctggacttcatcaccctctggtaagacatttgcactttgtacaggaaagcactgtgagaaaaacatgaggtgtctaatagtaaaaggcaaagtaactttatatttttagctacctgtgtacctgattagtttatgttaagaatagagattttaacattgaaagtacagattacttttttttttttgaaatggaatctcgctgtgtcatccagcctggagtgtagtggcgtgatcttagctcactgcaacctccacctcccaggttcaagtgattctcctacctcagcttcccaagtagctgagattacaggcatgcgccaccatgcccagccgatttttgtatttttagtagacagagcgtttccccatattggccaggctggtctcaaactcctgaactcaggtgatccaacctcccaaagtgctgggattacaggcatgagccaccgcgcccggccagattactttaaattttacatttattcattatttctgtttataaaagaatatatattcatatatgaaacatatataaggtaaggtaggaagattcaaaaattccttggtaaattaaattttgttagactttttgacttttggcttgaccatcaaggaagttctttgagaatttaaagaaaaatttttaccaaaaatccaacttatgaacacattctggcatatatatgagtagttgtgcttctcgcaggccctgacatttcttggcggttctggagagaaattgctttttttagggtagtaagtatcttctcacatttttggctggctgtttatcaaacaactaaagaaaatttaagtcatgtcaatacatttaattcaagagaggaggaatacctttataaaatatcccaaaataccaaaataccttcaaaataagaaagataaacagaactcactttaaatatcttaagaaaagcgttctataaagataatcgtgggtaatggaatcttggcacccaaaggaagcttaaaggtgacctccaatgctcaaattttatcaacgagcaaataaaacaccaagattaagctaggtgctgtggctcacacctataatccctgggagaccaaggtgggtggatcacctgaggtcaggagttccagaccagtgtggcccacagggtgaaaccccatctccactaaaaatacaaaaattaactgggtgtagtggcacatgcctgtaatcccagctactcgggaggctgagactggagaatcacttgaacttgggagatggaggctgtagtgagccgagatcacgccactgcactccagcctgggtgacggagcaagactccgtctcaaaaaaaaaaacaaaacaaaaaaaacccaccatgaacccgggaggtggagcttgcagtgagccaagatcgtgccactgcactccagcctgggcgacagagcaagactccatctcaaaaaaaaaaccaaccaaacaaaaaaacccaccaagattaatgagttgcccaaaatgctccactagactgaggtgaaggtgagattagacctcagtggtcagaggcccagccacgtgctctgtaactatgccagccagcttcttcctgtcccagagatgacctggatctccacagatatatagtctaaatcatgacagccttcatatacagattaacaaattgaacaaattaacaccaaaacttgaagtatttgaccttaagtatgtcagttattagcctggtaaagtcacttttataatgaagtcattcctgccgtcacctacaataacgcactccctcttggtttagtgctgaattttacttctaattttacttcactcacatcactggcgtcaactctgggcatgcaaagatctctacaccatcgaaagcacacagacaacaacttgattttctcccacagttactttatcaagtttgttttttttttttttttccattctgctctcaacccccaattttcaaagtacagtcctggaggaagttatccctgggttgtgatatgcaggcaaaggcacgtgtgtggaggatggaagaggtggaggtggcagtgggaagagaggggaagagaggagaaagggtgtagcccaaagaagaggaaaaggaaaagggatttctgcctccattattcttgcagagtctcagcaccttaagaaaataaagtcttattgcctaacaagccagactggacggcttatatgctgttgaatcaaacttcctgtcctgttttccttgcaggatgtggtggaactctttatggagacagaggctcattcaccagccccggctatccaggcacatacccaaacaacacgtactgcgagtgggtccttgttgctcctgctggaaggcttgtcaccatcaacttctacttcatcagcattgacgatccaggagactgtgtccagaactatctcacactctatgatgggcccaacgccagctctccatcctctggaccatactgcggaggcgtgagtaaaacaaacattttatattcccatttgttatttttagacaataatgagtcacttagtgtagactttttttttttttaagatggaatctcgctcttgtcacccaggctggagtgcagtggtgcgcgcaatctcaactcactgcaacctccgcctcctgggttcaagcaattctcctgcctcagcctcctgagtagctgggattacaggtgcctgccaccacactcagctaatttttgtacttttagtagaaacagggttttgccatgttgaccaggctggtctcgaactcctgacctcaggtgatccacccgcttgggcctccgaaagtgttgggattacacgcgtgagccactgggcccggcctagtgtagactttcaaaggcagacacactgcagaggaagaagcacagcctttaacaaattgagcagttttccaacttgcctttctattatgggagcatgagtgccatctggtgggcattgcattaaattactattaagagttacaaaaatcagccctgcgtcagaatcacctgtggagttacttacattagacttccagttcccaccgaaacccactgaatcgggatttcccagggaggagtcacagcacgctgtttttttaaaaaaaagctccctctgtgacgtcagtgcactgcctagggttgaatacccatgtttatttctgcataaatagaactgtagaaaatttggacacgtggctctattttatctacttcttgctgaaaattgcagaaattatttgaagaaatggtgaccgatagtttgtttttgtaaagctctgatatcttccctaaaaaaatcagaatctgacgttgattcaatattgcaggcatctgtgcttacgatcctctcatttgatgtgcaagtagatacttaaagagagtaagggctcacacctgcaatcccaacactttgggaggcccaggcaggtggatcacttgagctcagaagtttgagactagactggccaacatggggaaaccccgtctctactaaaaatacaaaaattagctggtatagtggcacacgcctgtaatcccaagtactccggaggctgagggaaaataattgcttgagccagggaggcggaggttgcagtgagccgagatggcgccactccactccagcctgggcgacagagccagactccatctcaaaataacaagagagtaagtaagggaaaattggctgttggcaagcgggtatctgtttctgatttttctgccctttaatcacttagactttgtaatcaaactagacagagaactgtatcagctggaaatctagatggtttttaaaatataacttactatttataaaattgataaatgctgttttcagaagtatcagaaaataggctaatttttctaaaaccctgggcattctcatatattcttaacacctttctttgaatatatttgcatatattttacatgcatattttttactgtttgatggtgtgttttttctacttaccaatatatcattagtaacatatcaataaaaacactgttgcatcatatttaagttttggagagtattccgttgcacgagtgtggcctaatttatttaatgaagcccctctaagtggacatttaggtctcttgaactttttgcaactacagacaacacttaataaactttttggtagtgatatctttatacatatagttacattacttggtgagaaatggtaatcacaggaccagcagacactgtatcacggggatgcacagaaggcccacagagagagagaccccagtaaatgtgccacacatcagatttagaagctaatcagctcttagacattgaattgaaatttacaaacatttcaaaagggaggaaaagaggcaattttaacaataccatgactttatattggtaggggtttttttgtgggcatggttttcagtggcttgcaaacatacaaccccatttgatccccacagtgacactcccataaggtggaaagaacaagtatatcctggacttgtataaaccgagttcaggtttatactgaacaagtataaaccgagtcactgagagaagtgacggccatttaatccaatgccacgttaagttgaagtatatagcgagataacatcaatttttttaactgttggtgtttacggtattttcccagttttacatttttttataaatgtggatataatttcatgtgtaattgttttttttcttaaaggtaccactgatttctttaacactttatcaatgttaaacataaatgaaaaaatgtaaaacataagtataaaacatgaagtacagaggtagctcttgttttgctaatatttacatacaactttttgtaagttgtaatattttactaatatttacatacatactttcacatgttacatacatacatatttacatgcataattacatacatatgaaagttgtatacttttgtatgtatactccttaagtatacaattcaactttttatgtatgtaaatatgtttgttaaacttgtaatatttatatacatacagtatttaaatacatacagtgtacatacagaggtagctccttattttgctaatataaacacaaaccctgatttggagatattttatattacggtaaataccattgttcacagggaaatcctatatcccttgcagctgcagaaaatgaagatctagcaaatgagagaataacgggacaaacaaggagaatcaaaggagattctaaaacttctgttgaccgtctgttgacatactagtttgtcaaaataaaagaagttattgaaatttggaagcagattaaaatgggagtaaaaagtagatgtgtataggaataaaaatattgtatattccttgatgtatctcttacagaaaaaaaaatctacactcacttgagtaagtgagtatcttggaaataagcctgtgttttgatgacttggggtagggctgaggcaggagaagccagtcatgtaagcatcatgagagcagggctttttgcctgttttgctcattttttaatgtcttaatacctgcagcgtggcagtgccttgatcaatatttgccaaatgaatgaatagaaagtgagagacaacggggacccatgtatccccccaacacacacacacacacacacacacacacacacacacacacacacactgttccacagaagtatatgaaaataaatctcaagaggaaaaactataaacactgaggatgaaaatactatattttacttaataggatcattttaattatatatgtttgtttcagaaaaattaaatttgcagtaagaacttgaataagaagttcaagttttttgataacagttttattgagatacaatttcaataccatccaattcatctccttaaagtatacaattcagtggtttttcgtaggttcacagagctgtgcggccattatcagcacagccaattttgggacactttcattaccccccaaagaaacccagtacccatttgcagtccttccccattttccctcaactccccacgcccagaaatattcctttgtaaagcatttgcattcattctttgcaaggttacttcaagaaatatatgcaggttcaccataaattctataaagtttctttatgtggtactttgttactaggctaacattcctagaaaaacgttcaaatatgtgaaatatataattggatactttttttttcaattttaggacaccagcatagctcccttcgtggcttcctcaaatcaggtcttcataaaatttcatgctgattatgcacggcgtccatccgcattccgattaacttgggacagctaagtgggtaacaactcgtgttcactcagcactttccctctgcagcacgctggacagcactctgccatcctgatacatgacccctgctgatgccacagagaataagctgaacttgtatggtttttcaccaaaccatggatagaatcaatatttgtaggccaggcgtggtggctcacccccctgtattctcagcactttgggaggccgaggcaggttgatcacctgaggtcaggagtttgagactagcctggccagcatggtgaaacctcatctctctaacaatataataattagccaggcgtggtggtgggtgcctgtaattccagccactcgagaggctgaggcaggagaattgcttgaacccaggaggcagaggttgcagtgagctaagatcacaccactacactccagcctgggcgagacggcaagactccatctcaaaaaaaaaagaaacaaaaaaaaccagaatcaatatttgtacattttctcgaacatagaatatagcttctttagtcttgagtgtgcatttcattctaatattttgagctgaaatttaaaaaaactttgaaagagttggaaatgattatggcatatgtgacatacatttttaaaagttaataataatagccaggggcagtggctcatacccataatcccagcacgctgggaggccatgatgggaggattgcttgaacctaggagtttgagaccagcctgggcaacaaagtgagacctgatttttacaaaaaatcaaaaaattagccaggcatggtggcatgcacccgtggttccagctacacaggaggttgaagcaggaggatcacttgagcccagtaggttaaggctgcagtgaaaccctgtgaattaaccactgtactccagcctgggtgacagactgagaccctatctcaaaaatgacaacaagaacaacaaaagttaatgataatatagaagcataaatttcctgtgaatgttcaattacacataataaacattattgaattgtacacaa

SEQ ID NO: 68 - DNA, 215539 bp, Mus musculus
tggactcagctggccagagtggtctccctcttgccggcgaggtgagcgggggagctgcggagcatggcctcacattttctctggggttttgttactttattgatggtacccggattagacggtgaaactggaacaccagagcagaagctacagaaaagaattgctgatctccaccagtaagtataagcgtggcttatttctgctaagggactggagtctatccttgctgtccgtaacaaataacacgagaagtcaaagtttctcaaggaaagtagcgatgttaaaaagcccctggggagaagatttgggctggtataaagaactgttttctgatttacaaatggtctttgttcacttgtgagtgagtcacatctgcgattcctgggaaatatatcattaagaaattctcagagaaataatgatagatgaatagagacggtttggttggattgagtgtgaaatgaggatatgtatagcaagtctatcattattccgcaagaaacttggtttaaaatttaaaactctatgtgctaattactgatgaattctctgctcaaattgtataggcctcggatgactacggaggagggaaacttagtgtttcttacaagctctgcccaaaacattgaatttagaactggttccctggggaaaatcaaattaaatgatgatgaccttggcgaatgtttacaccaggtaatgcactgggaaaacacagctcttgctttgttaatcaatatatactagcttaaattgaccagctcaatattagtcagcaccttgaatcctgagcacagaaaacacaaccataagatcaggtcttaaaaagaagccttatgctggagagatggctcagtggttaagagcactgactgctcttccggaggtcctgagttcaaatcccagcagccacatggtggctcacaaccatctgtaatgagaaaaagaagccttataaagacttcatggtgaggagagaggggtcaatgccagaagaggaggctcattgcttagggacagatttcaccattcagagaagagccagaaagtcagagctcctctaccagagaggaagtaaggaggggaccagagcaggcacagatgcgttctatagggagggaagatgagttctgcatagaaggaataaaggggaaatagagcaggcacagatgtgttctgtgcagtgtgtgtggggcaataaggaggggaccagagcaggcacagatgtgttctgcagggagggaaaagggagaaccagagcaggcacagatgtgttctgtgcattgtgtggggcaataaggaggggaccagagcaggcacagatgtgttctgcagcactattgccacagcagagtagtcagttactctaatactttattgaacgctttccatactcagcattaataacatcacatgctgcggctgggtcatgcacttgtgtgttatattgcttgactctcaggactcccccatgaaagtgttgattattattccacttatgagttacaaagtgggcaaatatttaatgtccaaaaatagacaataagtaattggggcaagatttaaaattcaaaaggtctcattcaaaagcatacatttttgtgttactaggggttgaatggagaaagttttaaattatatcgtagtcaagctctctctcattgagctatagcccaagactaccacacttcttaatatgcactctaaaacgttattacattatgggaaaatacatatacaaaagtcattgtagctctagaagagtcaactgagctttgccacatgttttgaatttataataatgaagctttagtgcttgctcctgtaagatggaaatatttttccatattgttattcttttctttttctttttaaaatattagatccagagaaacaaagatgatattatagatttaaaaaggaatacaactggtcttcctcaaaatatacttagtcaagtccaccaacttaactcgaaggtaaggtcgacatatgcattgcgctcatggtaagagccatgagttcttgtcaatccaactttgtacgtagtgagctcttttgtcgttagctgtttatcgttacattgtgaactttggggtcaagtggcatagctgtaatggaggctagggagtggtagtggcagaaggcagtaagcactacggcaaggctttgttcaagttctgatagcatctcccttgcccaaggcttggctttgttcaagtcttgatagcatcttccttgcgaaccaagggggggttatcactgtctttgtgctgtaatctccttgtgaaggaaacagagagtcagcttatcagtgggctgaacttctttttaaaagacctttaaaaatttacaggtagaaagaaaccccagaagggaagggaataaggagggggaaaataatgaatgaaaaccaaccaagcaaaatgagtccctaaaagagcagcatagcaatgggtaacatcacgtgacagtctctgcgctcggtaattggtgcattttcttccccgctgctacagctcgtggatcttgagagagattttcaaagcttacagcaggtaagttctacggatggatagtcaccgaaaatatgtaagcaacatttctaaggtaaatatggctgttgttcctctgtaaacctagtactcaggagaccgaaccaggagtattgagagtttgaatccagcttaccgtacgtagcaagttacagaccaccttgatatacatagtatgaattaacctaaaataataataataataaatagtagtagtaatataaatgaatcaatagtttcattttaagcggtcaatcaataccaaggacttgattttccattgtttgattcctgctcctgcctccgtccctaggatgtacgagaaaacccagggcagtatgccaccctaaggtcactaagaatgtaggatcttctacacctgagttcacagccctcaagccccaccccttactgtctcctttagccatcctgctgtggctttacttgtgtatgtttggtcagctagtgatcccccagctggcatcaataactgagtctcagaaaaccacatagcctctcctcgctgagctcagaatactggggctgtacagtgttctcggctccttaaaactgcactggctggcagttcagcttaaaacactccccagagcaaatacactctaaccttgctatgtgtaggcaagactgtgttcatttatgcttttcaccttccttgtgggcaaatgactaaaacatcggttgaaaccataacccttctgcccaaagaaatgtatagaatgtaccaatacttatgattctgcaattcccagttaataatatctgctcaaatagttacaactcctttccataacggttgacctcctactgtgggcattaagtttggtgaacaacttcatgttctctgttcatcacttcgagaacacattgtacctcagccttcacatcttcagggaatagctgagcacatgagaacatgtaaagagaactggctgctgtggagcaaagcatcatgggggttttcaaactcctacagtgcttcccagtttcattgctggtcaagaactggagattgcgattaaaatgagcttccgctgtcctctcccctatcgtcggggtcaaggttttaatggtttccaatgtcaatttccttctgctttgtgataggacaaggtcagcagtcactgccaccccctcctcctcttcctcctgactgctaactaattttcgttcctgctagaacccccaaatctatggctttgaactgctttcgttcaccagaaaactcaaaagtttgtggccaatgttcttaataatgtcctttggccctttactggacataactcattgtggttctgacatgaagacaaatcataggagggaagaaagcagaattcacagacacacatgaatgtgtagtcctgggatttataacaaggacagagaaagaatgggctttgcagtaaacagcactggacaagttggagatctcacccttcgtcagctaccggaattttgtccatggaactaagttggttttctctgagcctttgttggtacttatgtatgggtgtaaaaaacactttgtccctgcttgaaacaagatttgactaaggtcaatgcattaaaatgtcttgactgcatcatcacttgccctcggtgaaactgttgcctctgcacccctaaatctttacaaattgtacagaatagtgcccggtagctgacgaagggtgagatccccagtttgtgtggacaaaggtagccctgtttgctgtcctggtctaaaagcagtcaggtgagcagagggcaaaaggtgtatctgctggctccatttcaaacaaaggggcttggagagaaaagagctcagtcatctgagccagtggcaggagggctggtaataaaagatgatccgttttcaaaggcttatctagaggtacctgagataagaccactaggcaagagagtggaaatttccatttcattttcttagtgcaatagcaacattcattcttataccctcatttgaagtcttcttccttccttccttccttccttccttccttccttcctccctccctccccctccttccctctctctctctctttctctctctcttttaagatttatttatttaatgtgactacactgtagctgtccttagacacaccagaagagggcatcagatcccgttaccatgtggttgctgggaattgaacccaggacccctggaagagcagtcagggctagaaatctttattcctgtctagtagcacttgtttctcagatgaaccatgctctaaagtatgtagggtgttaaggaaaatgagcatgattgcaatttttacaagagaattgactagaagggggaagagagtcattggaggaattctggaggaagccctcatagatgaggagaaatccacaggctaactgaagcgctcttcactgtgcactgaggacaagcactattctctcactgacttaactgtcctgtcgtttctttcagaatgtggagagaaaagtttgcagtagcaatccctgccacaatggtggcacctgtgtcaacctgcacgactcctttatttgtatctgcccttcacagtggaaggtgagtcactcaggctttcacttaaaaatcagagaacggctggcagggagccagccatggcttcttcggatgcattcagacacacctattatccaccaaagtttctaggattctgtgcctcacgagtcacagtgacttgtgccaaatagcggcagatttaaaccctgggccatgacagttcgttctgttagcactggcttgagtagttcagcactggaaagcatgggctgagtcttggagtgcatatgtgaatattcttgccctcttctctttcggtagcagtgagaatactgcatgcatggacaccaacaaaatcactcagtaaccacccccaagtatagcagccttttgaaataaggactcgtctatgtaaagattctctcttgtgaccacttgaccaatgtactcccgtgaggagcatctcggtcctggtctgatctgagttctagaagaatcttagcccaagattaatattattaatattgtatttgctttcaccaagggcttattgtccacatataagtcattaaatatattgtatgaatactgttctataaacgcccatgtcctatggtgcctgactgggttctttacatctctgcagggtctcttctgctcagaggatgttaacgagtgtgtactttatgctggaacaccctttggctgccagagtggatccacctgtgtgaacactatggggagtttcaggtaacttctttttaaaatgctgtgtgtatttctggaggacaagtagagcaagtcattaaaagtatccaaatgacggtctataatactaggagactaggcacccacaggggctacctgacttttattgaacatattcatagatattttttgctcaaataaatacaaattttcaccccatgaagaagtcattttagcagcatctctgaggaaggagaaggccatcatgactgtcatagagtggtcagaaaacgtggtgcaattgagttgatgcctgagcaagaatcagattcttaaagagcagctatgggatgaagttgtgtggcacaggcacaggccaccatccctgtgccccagtgctatgctaatttcatatattagcaggcttacagttgcaatatgggcacttcattcacactgtgaaagaatgttgaccaaaacaccaaagattgaaagaacattcagagacccagttaagacactgcattctcaattagccataaggtcccagcagccataatgacccatgcagcttgtccccttacagactcattttgatcaaatgatgcactcatggcatcttccaatcacctcatcccacctatagtctttccgaggaaaccgtcccttaaactgaacaagatcccacaaagcctctgtcttcccactggacttcagcagtgttggccagtaaagccagctaatcaagtcaggaagttaatgcttgatcattggcagatttactagtgtatagtttcttaaaataatttttgagaggaacttgacagcatcttttgctatattttggctacctgcctgtgttccgaggccccataaggattaagaagccagttttgctaccgcacaaactcctcattgctcagcagaataatctaacttgattaaagagcggtttatttgctcccttcctcacgcctctggtgtcttgtagcagtgcccggcagaaatgagtgtaataattttgctttaaccctgtcatctcttaacatactttctcaagaaggaaccatagttcctttgttctgagctttaaaactttgattcactctaggttaataaatatgactcaggcaaacttctactaggcatgttttataaattcaattattgtgcacaaccccaaatgaccgcttctcccttatgtctaatactatgttctctgagaggcctggtcatggggcatagtgattggagtcattagtaaaagccatagctttgaaggacaaccagtgaactttttgagggctttattgttcagactttggatctaattgaaaccgtgcccagtgacattgctgccagtcacattctggctccagctgactttcattcccttgaaagcattatcgcatggtttctgtttatggccatttatcaatcagactgtccaactggagatatcagtgacaagtgtcccaaactgactcctagcacatttgattgcttgcctccccagtatctagtaatgtcctggaggttaaatatcattccaatatttctttatctcaccaccttttggtgcattctatgccagtaaatctgtggtggtgtgggtcaaagaggagccgttcatacaagccattgctatttgttttctagcattatttttcatacttaccctataaaagggaaaaaggggtggggacctgtagcattcacaatttacaactcttcattgcatgtcaaggatgtgagatacacacacaagaaaggagaggaagaaggagagagggagagacagtgttgtttttcagagggaggtagcatacccttacaagacaggactgaactcgctcttgttccctacgcacaggaaagctgaaggatttctgctaactcttggctcctggttgtttctagatgctgccctcatagatttactggggggcatttgaaagcagagcattcaactcttaactcttaatttcttggtatgaaaatggtttatgtagccttgagaatccaagttgagtacatctttttttttttttttttttttttttttttttttggtttttggtttttgagacagggtttctctgtagccctggctgtcctggaactcactttgtagaccaggctggcctccaactcagaaatctgcctgcctctgcctcccaagtgctgggattaaaggtgtgcgtcactatgcccagcaagttgaatacatcttaaatacatgaattgaggtatattccaggaacttgtctctatatgtatgttttcctgtattcgtgcatggatgcacatgtatgtagcagccagggaacaacctcagatgtctctcctcaggtgccatctaccttgggttttgtttgttgtttttgttgttgtaatttttattatttttaaaattttatatgtctgagtgctttgcctgcatgcatatctgtgtaccacatgcatgcctagtgctcacataggacagaagaagtgtttacttcctggagttacagatggttgtgagttgccctgtgagtgctgggaaccacacccaggtaccctggaaaggcagcaagtgcctttaactgcctacacatttctagcccctcagcttgtattttagacagtctcccattggcctggaaagtgccaagtagaccaggctgactggccagccagacccaggggccctcctctccctgacgctccattaccaagattattagcgtaagccacagtgcctagaccttttttccctctctcctttttcaatgggttctgggcattgagctcttgtcttcacacttacaagacaagcaattcactggctaagccattatccaccctcaacatctcgaagggatgaaataaaatatatactgctcatgagcataaaatttagtttttgctttgtgagtctgtatgtaataaaacactgagcatttaaaccattcctggaattctgttaagtctgggaagttaaaatgcttaattacctgtagtttcactgggctcagaagctcctttgtgaaactgaaccatgaatttgataaggaaaccatgagctgctgttgaatgatcttagttagcaatgtgggtatggcaggcaattagaaaattctgtgagtcagcttagttgggggaaatggaattctttcttcacaagtttaacaattcatcattatgaatgtctttgagaagatgaggcatcatgtaagtactagtagttgggatccctgttttattggcaatttcttttcttttggtcccccaccccactttggaaaagtttcttctttagagtgatgggtataggacaggataaactttcacctgtttcaactaattcctgaggttttgcctccagctgccatgagagccaagagaaaggcagttttctcttctcggtattattgtctcctaatcattgtgaacgttgcttctgattgtctcctgacttgctttgtatgtaagctagctcttagggtctggctttgccacccctgggtggtacatgtacttacagtgagaacctacaaggctttctaggaagaaaacaagctgtgtttactcccaggcacacagtgctgacgtggtacatcttatgctatctccatatcattggtggaatttaaagcattgcaaagttgaagtagtgaagataattctgttaggcatttgtgctagttaggtattacattttattaattcttttcagttatccaatgtactgatattgagccatggactctaagacaaattaactaggactatggaaggatatttcagtgtcttctcaattggcaagtgcagtttctgaagaccgaaagcctagtttcattctactaggataaaaccaacaataaaaaggtgactttttgtttgtttgtttgttttaaaaaaacaaaaactagtaaccaagagcttgagagatggatcagcaggtgaatacacttgttgcaaaagctcagtgacctaataggatccctggatcctatggtaggagagagccgactcctgacttaacacacacactgtggtatgaacatagccacacaccaacctacacatcatgcatacacatacacacataataaataaaatttaaaaggaattactatcaaaggcaggaatactactaaggtagtttaaaaaacatatgccttttattattgcttcataaatatttattcctttaaaagccatactgagtcactttgaaaacatatttcacatacaaatgctattatattataaagtccatggaaaattttcatactcactttactcttgagaacagaaatgtaacacagaaaaataacggagctgagtaaagcagacctgggtttctcttcatcttctctcatacattggttctgtggctgtaggcaatcttatttgctgcattcctgtaaaataagatgaaaacatttgcttttgaagatcatagcaagaaaggctatagtttacttgtttgttttcttttctcctcctccttctcttccccctcctcctcactcctcttcctcctcctccatttctccttctccttctcgttgctgttgttgttgttgttgttgttgttgttgttgttgttcttcttcttcttcttcttcttcttcttcttcttcttcttcttcttcttcttcttcttcttcttctccttctccttctccttctccttctccttctccttctccttctccttctccttctccttctcctcttcctcctcctcttcctcctcctcctcctcctcctcctcctccccctcctcctcctccttcttcttgttgttcttttcctccttcttctgattctggctcttcttgtttttcttcctcctcctcctcctcttcctcttcttcctcctcttcttcttccttttctccttcctttaatatttaaattaagtgaaagaagtctactttgcatattgtttgaaagactataagatttatgtccactcagctccaagtgacaatggctaggaagaagtaagtgagagctaaggagagagggttgccctcagacacttgagcccaatctactctgacatcataagtagttttccagtggttaggtatttagctattagagaaacatacttctgagtacttcctcaagagaaagacctttggatgaggcatcatgagtcagtaccttgtcagaggtgaatgtttagtgcatctgttccggatttacactttcatcactttgtcccagcggttcccaaataccctaatagtccttgcatggaaaatgcatttagaaaaacttgtaataattggttctgagttgttttgttttacatgtcaaacttacagagtaaatatttagcaatgaatcaaatgcttaaatatgtataagaaatgcttaaaaatatgataatcccaaagagtataatttgcttccctggaagaatgagttagtgaagaggagagataacagggcataagggaaagcatggaaaaagatgagtagctattagatagggagcgaacatcaaatctaagtctaattactaattattattaattcatgacctggttttaatgagtaaagaaatcttggaatgctcatagacattatttattaattaaataacttttctataattacatagtagtgctataaattacatgcaacatacttacatatttttaaagtattcatttacctgagatagaaatttaactgtgtcccctgtattctaagttggtaagtctggcagctctaaatggtagtgcatagattgtggttttccatatctgtcctctccatttctggcaatacacattgaactctttttacttggaagtgactctgggtatcaccccagcaattgtttctcaatccagccctgacatgccttgattgtttcaaactcacttcttgcactatcacactttgacatctgtgattattagctgagctcctggtactgaatgcatagtgctacaacaacctttctgctttgtagcgagtcttcctttccaggagcctcaggaagtagctcaaggtccctgacatgagagacaaacatgttctccagatcctccctcgtcctcctctggcattagcactgacattcagttccctttgggatgaatctctgctggggtctaaccatgacctctgtgcttggcttttccactccctaggatgtgctcacacttagtctttgtgagtccttcacccccaccacatctctcaaccttacaagatccctttcctatgctttgcagaaatacagctaagccagcaacttaaaaagtcacaactaaacaaacttcccctatttgatttctgtttacctcacatttctagtggtagtgcatctcttagtatttaggaaccgtatgatgattatattttgttatgcattaaagtatgactgtgaaggaaatgtccccactattgacaacatctcttcctgaaagaatacatatttcctctgtaatagaaaggcccctggcagagaccatcacctgcgcttcttgacaggtgctataggatgaatgcagtgaacttgctgatctcccgtttcccttcttgaatgaactccattacccatgatttacagacacctgacttttgacagtactgtttgatgactgagatcaaaagaatttattgccccagtcctataaaacattgaatcatgattctctgacaattgatttgcaaagataacacaatcactcggtgcactgctcggaggagaactgaggaatttcgttctaaggttgcagctgaccaaactgcttggctggtttattattaacgttattggtttgcactgatggataccttttatggatgccaatggacagagtctggtactaaaactgcaaaccctgagcttgtgctcttgtgtaaccaacagatgtgactgcacgcctgatacgtatggacctcagtgtgcatccaaatataatgactgtgaacagggctctcagcagctctgtaagcatggcatctgcgaggatttacagcgagtttatcatggacaggtgggtcccttcccctcagtgcttcttgtggaaaccagtgttacatgctccccatgctgatgctgactctagaccatcactgtgctgctacaagtgactgtagaggtgaagtcccctccatttcttggtaggacacacacaagcaaatggggagataatttatacagaaaactggattcagaaaactgtgaggcttggcctcctggcctgtatgtttaacaatgacaagacacggaaacattacaggctctgttttgtcaatagcatctcatgtctggatttttcgggccttgagtccctgtgaagggcacactttgtggatctagctctccagtcttcctctcagctctgggtcctagatgggtagggtagtctggctagtttgatgttacaagaattttagttattctgaattaatttttaaagattcttaagagatagaaaacagtcccttctagcagtaggagtgagaggaaggagtggagagaagagatttttaagaaggaaatgattgcccgaagtctgtacctagttgggtgtttaccctttaactacatagctggctgagtccattgactgtaattacagctcttgattactgttactctttcctgggcatctttgggataaattataggatccttttatcctgaaataaagatgttcctttcccatggtctagtctaaatgtttaaatcatatgggaagagaaagagaatccactcaactgacctgatgcaaatgaacgtttgaatgacagtaaagagttcagggtttggtgagatattcagacctttttctctcctcttccccatagcctttattcactttattgttttcctttcagctgagatttaactgtatctgtgatgctgggtggacaacactgccaaatggtatctcctgcacagaggacaaagatgaatgcagcctccagccttcaccttgttcagaacatgcacagtgtttcaatacacaaggttccttctactgtggcgcctgcccaaaaggtactttcttgggggacacatgctaggctttgaataccacacagacaaggtaccagaatcaacttccctctaccactgatcatttttccagaggtgcctaaacctacctgcatgtcctactcaagagcatcttaatgctagaacaggtctccagagttggagatttgctaggcagtgtgccagcatccaactttaggccataattagacgtgggaagagagttattttcattgtaaataggagaagttgaggcttagaaagactaaataacttctccatgtacacaaagcttattcgaggccagatataaatccacatctgcctggccctggatctgaggtgagctgcagagtacgccatgactctgtcaaccaaggcacatgtgcacctagagctgcatttagagacttgtagtttaacgggtgcttgcatggtgttggtttagaactagcaaaggtaaggagaagaaagtcctctcctcttgcatctcaggggcaaaagtcacacgtagctgaattctcaaacgtaatttatgatgccaatccttaaacagtagatatcagataaaacaaatggcttaaattaaagggtgggtagtgtgtgcttgctttttcattttcttatttgaagaaaacaaagagaaacaaaacttaagaattgaaagcaaaaattttcatttttgtctttaatcattctattttttttcctgaatcttaaaggcactatatgtttgttataaatgttaggtaggtattacaagcatatctgtacaaaagcagagcatagtactatgtcttcttactgtgagaaccatcattagggctagagtgcatgtctctcagctccttgtgtatgcaacctaaccatgctcagacatgatcatttccttaagtcagtttatgaaggataccccacttagtcctaacattataagtatgctaaagggtgaagatatgtaaacatgattattattattataatgaatcccgagagtaatactaacattataactggctacaatagaatatttaaaggtttcttttcacctttaatctcatccttcacttttctttacttttaccaatataggcacagttttcagcaagtcattcctgcagattactagtatgactccaactcttcataatgttctataatttgttgtatacacttaaactatgcatgagaaaattctctcaatgtttgtattgtgcaaatgtacgaatgtgcatatgtatgggcatttctaaaattacttttaaaattcagtgccatagatgagtcttgaggcgctcaactgtttttattgtccttataagcaatgcctcggtaggtcttctaatgtattttgtaatatgtggatggttttatctacaaagaacacatttcaagaagtaaaattacttaaaaaggaatttatttttaaaaattaatgaatgttgccagatctcattccaaactggttttaattaacatccaatcaacagtctgcaagtgagccccatttatctaacacttcatcagaattagattctatgtatttaaagtaaattttggactaccagttagagatatctcattttaatctatagttttgtgtattttattcatcagtttgaattattctttaaatttttattttatttatttatttgggttggggagtgcatgccatagcatgcctttagaggtcagaggacaaattggagttagctctctcctaccatgtgagtcccaagcattgaacgtagatgatcatacttagtggaaagcatcattacccactgagccatgttgtcaacccagaatgattttgtgtatgtcttaactacctgtagttcttccttgttaagttgttaagtgctaatcttttaatcaatattttttctaggttggcaaggaaatggttaccaatgccaggatatcaacgaatgtgagatcaacaatggtggctgttcccaggctccactggtcccctgcctgaacactccaggatcattcacctgtgggaactgtccagcaggtactacatcaggcttcctgatgccatcacaaggcaatgcccttgaaatagaatctgtgctcactttaaatattttttccatttttattagatattttctttatttacatttcaaattttatctccttttctcatttcccctccgaaaactccccaacccccctacccctgctcactaacccacctactcccacttccctgtcctggcatttccctacactggggcatcaaggcttcacaaggccaaggtcctctcctcccattgatgttccataaggccatcctctgctacatactcagctgaagccatgagtccctccttgtgtagtctttggttagttgtttagttcctgggagctctgggggtactggttggttcatattgttgtttctctttggctctgcgaaccccttgggtcctttctttagttcctccattggggaccttgtgctcaggctaatggatgactgtgagcctccacttctgtatttgccaggcactggcagagcctctcaggagacagctatatcaggcctctgtcagcaaacatttgttggcatccacaatagtgtctgggtttggtaactgtatatgggatggatccccaggtgggacagtcactggatggcctttccttcagtttctgctccaaactttgtctgtgtatatcctcctatggttattttgatcccccttctaagaaggaccaaaatatccacactgtgtcttccttcttcttgagccttcatgtggtctatgaattgtatcttgggtattctgagcttctgggctaatatccacttatcagtgagtgcatagctgtgtgttcttttgtgattgggttatctcactcagatccaacatgtaataaggacatatgctccattatgttcatagcagccttatttataatagccagaagctggaaagaacccagatgttcttcaatagaggaatggatacagaaaatgtggtacatttacacagtgaagtactactcagctattaaaaattatgaattcatgaaggtcttaggcaaatggatggaactagaaaataccatcctgagtgaggtaacccaatcacaaaatgatttctaaggaaaaaaaaaaaaggaatggtgtaggatgcctaacttacagtgtagattcatcaatgcaataggacggcaaagtaagaaagagacagaaaacagtatcagcagcaaacagcacgaaaacacagacctgggaaatgcttctgtgagaatctttagatccatcactcttttgtgctcatacatgtatattcatttaatatattcacttgtggaccatgtccacagataaggcttacaaacatgatacatgttagtttctttttttcttctggaaagaggtcattctggttgtcctctagttcaaataaaactagtcttcaagaacttcagagagttctaagcaataaatgaatatatatatatttatgtatgcatatatgtatatatacatacatacatacatacacacacatacatatataaaaccaaagggggggtcaatatttttttttttgagacagggtttctctgtgtagccctggctgtcctggaactcactctgtagaccaggctggccttgaactcagaaatcctcctgcctctgcctcccgagtgctgggattaaaggtgtgcaccaccacagcccgactcaggtcaataatttttatacagtatattccaataatgttttctcctccctcaagtcctctgagttattttaataacatgaaaaatggtactttagacatctgtaataaatcacccccaagaacattagtcaatgaaattaaggtgtgtcaatttagagcctgccatttctatgacacctcacacttgcaagcttagaatatgtacacgcacatacatatgtgcacacacacacacatcttcacacatatatgtatgcacacacaaagccaccgtgctgttttatgagttcttttaaccatgtcctgctgattgactctgtggagtttcatatctctatctacttggctcttcagacttggttgcctggtatcttagtcggggtttctattcctgcacaaacatcatgactaagaagcagttggggaggaaagagtttattcagcttacatttctacactgctgttcatcatcaaaggaagtaggactggaattcaagcaggtcaggaagtaggagctgatgcagaggccatggagggatgttacttactggtttgcttccactggcttgctcagcttgctctcttatagaactcaagactaccatcccagggatggcaccatccacaaggggcctttcccccttgatcactaattgagaaaatgccttacagcaggatctcatggaggcatttccccaactgaagctcctttctctgtgataactccagcctgtgtcaagttgacacacaaaatcagccagtacacctggattctaatcttagacagccattgtctttttcccgtattcttgaccttgtttctcaccctctgctgtgctttggttaggtttcagtggtgatgggagagtgtgcacccccttggacatctgctcgatccataatggaggctgccatccagatgcaacctgttcctcctcttctgttctaggtaatggctcaccccccattgatccttggaggtttcattcaaaccctcttttctgtacaatttcatattctaaaaaaggaattattctggaaatttcaggggggggggagtgttgcacagtctcactctgtagccttgaaatcatataagcctcctgcctcagactcccaagtactcgtgttataggcaggagctaccattcataactctcaaaatcgttatcttgatcctcaaaaaaccctaactgatccccaaaacctacatatatttaaattctataatgtagttactcttgaacgatcttctttgactaaaagttgtttccaataataattaagccaaatagtcaataatgactttagcaaacagaatggagaaagggaagaaggacatatcaccttcttttataattcttctttctgtgccattgactagagttgtgcctttggctactgctggcagcagagaacatatagcatttatttcaggcatcacagttccagccggaaaaaaaaaaagtttacttctaggaaaggacaaatgaatgcagggtggtctcactgtgtagttgctgtggtaccacataaacaagctccaggtcatgtgtgcagtaacacatctttccgagcattgtctcattgcaagtcccagtcaacagctcgtgcaatgtttatgtgccccagctctgacaatcacagctactatttttttttgtcttgattggttttatagctaacagttagcttcttagtccttttaaagcctgtgtttttgttgctattgaacaataatgttttcagttgtacttctcagctttctgtttctcatatgcactgctcatttgctttcttttgagtttgtcacctttgattttacagaggaaaccgtcttccccttctgttttgtgtttttgcaacactttgttcgcagcatgtcattctctggattttgtactagtattttctatttagaggtgagagaccaaaatcttttaaattcaaactcagttttagagaacctgacctaagtttgaactcaggtaaattaacaggctggtacgtagcattaatttccaagttatcccccccaacaaaaccagagcctagctccagtctctaggctaaccctcaataggaccagcatctccagattattctctcaacaaacctgtaccccactcccaggttacaagaccaccccctgcctaatgatcaccattgcagagagaagcagaatttaagtttatgatatgactcccagcaccagccaattatgttaaaggcaatagtaacttcccagttagatgcttgtactctcaaccctgattgatgcctactataaaaccttgccctgacagacatttgcccccccccccccccaccaaaaccattcacttgatggtggtgcattggggttaggtcaagctagcttgaatagaataaagaccctgctgtgagttgcatcagatgggctcctgtctgttttttttaaggggtggggatcatcacattggtcatttgtgtaacaaaaagaaacctagatgatttccatccaaatggttagactcaacctcatccattaaataatacaacacattccttgatgtttcaaatttttatttttattaatgcatccttaatgtgcatgcattgatgagaatatattcatgtgcacaggtgtatacttacatggttgtatagatcgcacacatatgagtgaccaaacgatcaggaagtgtttaacagagcagtgatgtggacaagagcagcattcctcagattcctcaaatcccatttgatttctcctttggtctcatcatatgcttcctatctgatgatggtcaagacatccccatgcctctacactccacctctcccttgtgaactctgggcagtagtagcttgagtaatagtcagcttgagagaccaaaatgaaacagacagatatgaacatagctacattttatgcacaggaactggtcgtatattacatggtgtgaagtagcatttcatgttctttaacgatcatcatggcaacccgtgactttgcctgaggaatggcagcagatatccaggcaaagcatagccggtctgagtctccttacaccatttcccttcagtaaatactttaaaagaaatagataaaagaatgcaatcttatgcactcctttatggagaaaagattcctgtatgtcttactttcaaatcttgcaagcactatggccttaaggacataaaaccaccactatccatttatgctacaagtttgtcgttaaataatttattccaattgaatacttcagtgagattttcaatgcattttcatcaatatttgctggtggaggaacgtgtttacattcatcatcatattaattttcatgcattattccagctcttttatagtgataacagcaatgtatttctgcagtgacatggtgaccttcagcaactagggaatctgaaaatctctggatgttgtatttagtggaaattcataaaatattaaaggaggtatttgttctaggcattacaggataaaactgaaaatcctggatgttttagtattatttttagcttctaactcactcgtaattattaatggtactagaagattcaatcatttttgaaaattgaccaacttctttttccaaccccttatttggtctttccttgtattttgtaacatggaagcttagaataaaacattaaagaagcattggtgtttctattttgtttattgtgttactgtgttattttaatctgtagtttcatcacaaaattccttcgaatgcctcaaattcattttttttcagtggaattggacataggtgaaatctgtatgtacccgtgtctggaacatgagacctgcccatttagtgctaatccttgctatcactggtaccacgccttaaagtttctcttgaattttcacattctaactgtgtctccttgggcaggacaatctttgtgtgcttgatttttatctgtaaaggtgtaaatatttatagcagaatccatttatagaattatcaggaggattgagcaatctacctctgtatgtgtagacacaggtctataatgcttgcaacatctgtttatagggttatagataggattgagcaatctctgtatgtgtagacagagatataattgcttgaaacagataccgctgccataaaacttttattctgtactaaagatcccttcctgacgaagaagtgccatttcccatttcatagttccttcttatttgtacataaccttagatcatctgttacatgagaccatgattgcaaacttatataagaaatcagaaccatctaatgctttgttttacaataaaatgggaaagacagagattttaatcatttctcctcttgctttgtcttgactgcccataggagaaaatgcacttgaagttggtggattcttatctggacactagaattgaatttcatgactgcctctgaaccaagaatacctacacttacacatccatttttatttctgaacagggtccttgttgcctgtctgcacctgtcctccgggatatacaggaaatggttacgggtctaatggatgtgtacgcctcagtaatatgtgctcaagacacccgtgtgtaaatggacagtgcattgtgagtcttgctcctcttagggagattaaaaacttgcaaagaaccaatcatagattcaccattttatttcatatgattcttaagttaggtttctttctttctttttttcttttttctttttgcttgttttgttttgtttgggggaggtcctctcctctgctctcccctcctctcccctcccctccccaccccctctctctgaccaggttggcctcaaactcaaagattcacatacccctgccccctgagctctgggattaaaggcatgtatcaccagcacccagccacaagtttaatgataatgattcaagctttatgctaaggtttctgattctcagattagagattggtagtaactttggttcccaggaaaaccaataagccaatcaattgattttttaaaagatttatttataggtttgtatgtatatgtccttgcacagacttgtgtgcaccatctgtatggagatttctgctgagttaagagagtgttgagtatcatacaactagaattataggcagttgcaaactgtcagatatgggtgctggcttctgcatcctggtcctctaaaatgcagcaagcccttcaaaatctgagctctatctttgctccccatttagttgttttgtttgtttaatcaatgattttcaaactagtaagcaaaacctatagttttatggaaataaacatgactatttatactcagtaattgatgattttgtcaattggaaaacacacagtatagttcaattcctgttaaatatataccttacgttgtcacttcttttcatgatttgggttgattctcttatattttctgtccacttgatttgtagtatggcattttcttttcatcttaggaaacagtatcaagttacttctgtaagtgtgactcaggctggtttggacagaactgtacagaaaacattaatgagtgtgtgagcaacccctgtttgaatggagggacctgtattgatggtgtcaacggcttcacctgcgactgcacgagctcctggactggttattactgtcagactccccaggcaggtatggaagacattccttggaccacagatgctcccagcttaggggtatcatcgtccaatagactttttgcgtgtttgacaatgtaatctgatttcttcaccagtttacacactgacaagtagatttctccttgcagaaatagcatagaatccacgaagtggtatttgtaaacctcattttcaacaggaaacatttttcttcaaaaatattgtaaatattttccatgttctgtatattctttcataatgtaccatatactgaggaatttgcctttcagttttcttggagggctgctttcttcatggcaggcatctagtgatcataggaccctaactcatcattctcccacttactgatactttgcctggttaatcgaggtatagactgtcatttattgtcaatgaacagccttcattctatccatatcactatgtatttctctagttccatagcgatattcacacttcagccaggttaaattcctttctcatttgccatccagatgtatctgttccttgggcaccacactcaactcttcatccaagtctactctaccagctgcaagctctctgttcttactcctgttttcagatcagtgcattgattgaggtcttaccacacgcttaggacaatgatagaatataaaagcagaaaacactgcctctacttatctactccccatgtagtctaggaactgagactaccttgaggcagcagaaggtggcattaaatgtcaaaactgatgctgtaattgactcatgtggcgtaaagcctggtctatcatggcagtggccaaggaggatgaagaaatcgattgaagtttggagaaaatgtgttgggagtgaaaatggactgtggatgcagaaaggagggaggaggcttgatgtcagcacaaagggaccagaaaggaggaaagtgtgggctggaggagcctgctctcttcctttcaataatctatgaaaaccacaattcatcttttttatttttgcagcttgtggagggatcctctcagggacacaaggaacctttgcctaccagagcccgaatgatacctatgtccacaatgtgaactgtttctgggttgtcagaaccgatgaggaaaaggtagacatagtaactcttgtctatgagcagatctcactcgtgcattcaaaactgtgatacatatgacatgtatgtgcatgcgtatacactcagagaaagtacgtatgagagttccactgtcatatattgggcactttctatgtgcagggctttgggctatatactttgtttatctttctctaacgccatacaaactctttgaaataaacaacaatttattttacagttgagataacagaaagtaagagaagggttggagttttatcttctaatactacctagcttataaaaggaacagatgaattttcaaatcaagtttggttctagagtctctccctccaccccccccccactctttcccaccctttgcctagccatcctagccatctcttattgcagttaatgaaggattcccaacattggttgtctagctctaggcccgtagcaaatctgttaaactgtgctgttactgcagatgctgcaaatgtaggatttgaagatgatcattgaccctagtgggttgtcattaagtgggggcaactgatattaagatggcttcctatgtagtatccactctgtgccaggtaccatatgcctcatatacttcagtatactttaaactcaagttaaaaattattttttaatgtgtgtgtaaatggagcctaaattgtttgaaacatttgtccagatatgcgtgctttttaaatggcacgtggttttcaagacaactgactccaaagttcatgactctgagtcactacatgaacaactaaaactaacatctgagcccatgattttttttcatcgttcctgaacttttagatttctaaagtacttgttttccaagcaattctcagacttaaagtggtaggccttaatagttaaaatttcaatgggaaaatagttaaaattttttcccttgaaatcttaacttttcccagcaaactaatgttatagaggacattgtgcaagagtcctctataataataaaaaatattatttcccgtaaagaaggacaaccagttgtagcttggtcattacataatttattctattgtgaataaattccaaaaaagtttcccactgggtctgttgtgtgaatttccttccttccatttagttctagtgaattctatttcctgacattgaaaatttatttttccaaggaaaagatgctgtgaaaaatctttatatgtttattaccattttaaagaaaattcatccttttttttttttttggtgatacaattttacatagtctttttgccataagatataatagaaaacataaacaactaattaacatttatttgatttccatttacaattcttcaagtagaaaataattaaattttttccactaagataaatagcatttccaaaagtcgccagagactttttctgatttctctatgaattatagtttggactgaatgattttaaagtagaattactgtccacgttggcgagcaactacagagtggtggctgtcactctttgtgtgaggacttgtcaactaagcttccgcattaacatgggagtgctttcatgttcttccaggttctgcatattaccttcacgttttttgatttagaatcggccagcaattgtccccgggagtaccttcagattcatgatggagactcctctgcagatttcccacttggtagatactgtggctccacgcccccccagggggtccacagcagtgccaactctctctatttccatctctactcagaatacataaaacgggggagaggctttaccgcacggtgggaagcgaagctaccaggtaagtaggaaatgaagagcaagcagaacgttcatgatgttagggcatgtgtggagactacaaacaatgcaacattttaaatagtcattgtaagaacaaataatttaaaaatgagtttgatttttgaattcaaggacagaaaaactagggtgcattgcaaagctagaatgcatgagtagtaatggggcccttataaaattactggatagaattggtggattgttttaacacactacttgtattgattgtttcagagcttaatacaatttattttgatttcatttactccctctcttccccctaattcctcccagatccatgcttatctcagtcaacttcatgttgtattttttctcttctggttttgaatacttcaccaagttcaatttgtgctttccacattcctagaggttcaaggacctgtacacaagcttggccagagggacaagctgcctgtgtgcccagtgcttcgcaggcggggaaagcagctcctcagagcgagctagcctaagaaaagccaccaactccaggttcaagtgagaggcctcacctccatctgtaagatggtgtgagactgagaaaggcagctgaagccatcccgcagcctctgcatacacatacactcatgcacgtgacatacacacatgcaacaaaaacaccttttaatgtatgcactgaagtgaagcgttttactctattttattttcatccataggttcaaatgtgtgtttttactagtattcagtttgatatactttcccatctgtatttatgtttctcatgtagtgagaaaaaccatgtattttgtaataattggacatggctgtctatatatgacaatttagtcaatttggttagtagtgctgtgcaaatatgttatttctccagagacttaagacgatgttctccactgatgagaggatggcactgaggtagcaagctatgagtatagactttattaattttgttcagacaactttgcttaatatattttatttaattttcctttcctaattatttcgaatatttattgtcccttttcgttcagtgtatagtgaggatgcataagatctactctcttaatttaagtgagatcagttattggttggttactcctacatgcttggtgccaccattgtcctagcaggcaggacagcactgtaggtcaaagcatttgtggccaggctgacatttacatttctcttttggtagtgtgtacaatgccttcctgtactaaagacacctgaacataggggtatgggctctatgtaggcaccagctcaacttcttccagttcaatttgttgtgtaggtgttgtctctaacaatggggtcttgtttgggagtgtttgggcctcccatgggacctttgaccttcaactcacttagatgtaacccaatcctgcttctacaagcttcattgggtgacaaaaaagatgctcagctgggactgtcttcattccattacttgatttcatttagatctccttcatgtgtgtgtgtgtgtgtgtgtgtgtgtgtgtgtgtgtgtgtgtgtgtgtgtgtgtttaggaagcttctaatgtactaggcgtctatactacccctcaaaaaagcacttaattttagctatctcttcttgcattccctccccatccacctctcatttgctactcctgttccagcctctgcccctcccatcaaccatctagaactgtctactctatttcccttttgtaaggagatgtacctgtccctagtcccttactctattcctaacctctgtgtttctatgaattgtaacttatcattgatataacagctaatatcatatctatcacggattttatttttctattgaaaacatagagtcaatttttttgtcaaatttcccctctaagtctcactaccgttactatggagtctttgttcggaagccccagtatcagagtatttctggctgtgctcagagtgacttgtttattattgtctactttttccaacttggccttaataactgtatcatgaacagagcatcacagataaggtgttataaggtctctgggttgtattctcaaaacagctttgtagtaacagggagttccgttactgatggattgcttggatccaactgatgctggaattgagaagggtgtgtcaaagttccatgattcctaagaatatggttcttaccgttctagcacaggctttctgaaccttcagtttttttcagaattatcacaaaactcttacccttctcactgggtctatgataacagcaaggttattcattctcttcagccttggcattccctggctccatacctcgtggtggtctctgttaggcattctgtagtcttcctctatgtatcaacagttaaaggttcctctaaatacctgggatcctcctacaaaaatatttggtgctgtctccatgcaactgcttgcttacatagtatgttgctctgcaattttgaatacttgagaagcttcaaattctggggttttgttgacttaagctagcagaagtgttactgtctcctttgtttattttcgtaccatgtgaagttacacatgggaagatttccagaataagcccagggttcagctcataacctttccattgctcaaagagcacagttcagtgttatttgctccttaagacccctcaaagtaacaataagcaatttttctaacgccaagaactaagcattgttgacatttatttgttaaagaaactagttatgtgttctacacatcatccacccttctggattgtgctgtttgcatctcatgtgccctttatcatgttgtaaactggtacttggatcaaaaggtctattaagttatttttttttcttgcttgccaaggtatccactttgggtagcacatcatatcttctttttatctattaatacttctggattgatcagattggtgatcttctcattccaaagcatcccttttgtgctctctgcagtggctttttgtttttagcagctcttagattcataggaacccacaaattaatgagagtataagtgtatcatttactatctatctatctatctatctatctatctatctatctatctatctatcatctatctatcatttgtctgtctatcatctcaggtaatcaaaaggcttataaattcactacatcaggtatttgcttacaggtaggtcctagaggatgtgtcaatttgatgcaaacttgaatcacctggaaaaggaccctcagttgaggaactgcccctttcagagtagcctctatacctacaggctacttatgcttaaatggggcattttcttaattggtaattgaggaagaagggagggcctctcctactgtgggtggtaccactcctaggcagatcatcctatttgtgtaaaacaatctggccgagcaaatcatggagagcaagccagaaagcaacactcctcctgggtctctgatgtttcatttcctgccttcaggttcctgctttgagttcctcccttggtttcttttatgatgactgtcacctgtcacctgtaagccaaataaatccaatctgtcccttggttgttcttgctcagtttttatgagaggaacaggaagcagactaggagagaggaaatgcatgatacatttttaatttgttcccttttctgttggtatttgagttaatgacttgtttccctgggattcttcaaaatgattaatttcattttggtttgtttttcataaattagtatacttgataagagctgatatagattctttaaaaatgttcttttttcgtgttttttttttttttttcctacttagtttctgagtctgtttgcgcagactccagtgacttctgaatgttgatttgctttctggtttgaaaggatgttccaggcccttccacagtttgatggcttcagcagtgcaaaatgctgcttccggagagagctgtcatgtcctatgagaaacggattttaactcctacatctgggtgctacaactgatttctattgctgggtctctgaacagaagtagaaaacatctttttaatattattattaagggagcttaataatgttattattaagaagttaaggtttagttttccttgacatttatggctcttttctcctgaacaaaaaccatgattcccattagtgtacaacattagtgtatcacttcaggatttgatcctacaaattttcctaagatcaatggcaatattatcactaataacataattgaaaactacttaatgttttgttgctggtgttatatactttatgtacattttgcatgggacacattggtacacgtctatagtcccagcactcaggaagtgggggacaagaagattacaagtctcaaatctgtatgatatgcataacatggccccatctaattagtaatagaaaaaaaccaaaggcatattgttttgagcaggatcacagggttttaaagtcacatgttttcagtattcacgtttaacttttcaattcagtgaaattatttcctcttatttgtgattttagagattacctcttaaattggttaatacatgtaattttataattgtataagaagtatgcacagtgctaaagccctcttaagaacattatgcatttttaaaatgtctagtttccatttctgactctgctatcttgctatttgctataagtagatggtttgtaaaattagctttacacttataccgccaataatcatataggctaatattttcccttctcagataagaagcagtattccctatgtggaggggtttacttgtcctccctgggcctggggactgcatcaaagcttgaatggagcacagcattacatagatgtgtcctggcctgttaagccatatattgatggcctcgtgacctgtttcctctaccattttggaattctaaattttatggcaacaaatactttgcatgttagccttattccaactttcccactgggcctttggaattgtttggtcaacagcatgcataagatttggtattttatgtgttatatttcttctgcagtgttcagaacaccctgtgtttttataacagtgtgggacagtgactacttcacagccagcctaatagtttgtttttaacattctggactcttgacttcgagagtcaagaaaccttacctcagtggtagcagagatgctggacatctttctatgtgtgcaaaagatgctgggatcttttcagtgtactctctcttcatactactcttctttttttaaattttctatattatggatgataacttagatattacacttccatttgatctttaaaattttacattgattatattattttataaatttaaaagttttatactgataatagacttctaagttaagttttaaaaatgcacttctctctgatcttggatgttccctgctaggttcaatgaaaaccatgaaactgattattttgggttttcctttggtaacaaaaactttggcttagtgtgtgtggttttatgaatatcaaccatatttaaaatgacatcttagttttatttctttcttaaggtatatttaacaaagtcttgattagttggtgtttctgctctttgattctactgtaacctttcttacaaatgaccaaaaattctccactaaataaatgtgaatattaaagggaaacagttcttatagacgtttctagtcactgttcagccacatagggagttgtatagtgcgctgggattggcatctggaagcactggggcccggttcactgctgtacttgcttcattcctggtacagtggcttaattgccatgtacatttacttataaacaagaacaacatatttatttcatagttttgttttgttttggttttggatttttcgagacaaggtttctctgtatagccctggctgtcttggaactcactttgtagaccaggctggcctcgaactcagaaatctgcctgcctctgcctcccggcttattttatagtttttatgttataaaatttacatatgatttatataagactattttgtaattatataatttgtatgtttaataatttattacagcataagaaaaactttcttaaaagaaatttatagctgtgcctggtgatggcgcacacctttgatcccagcacttgggaggcagagtcaggagaatttctgagtttgaggccagcctggtttacagagtgagttccatgacagccagggctacacagagaaaccctgtctcaaaccaaaaaaagaaaaaaaagaaatgtatatgtgatccttaactattttaaagtataaagtgttctggtttattgaaagatgtaggggctcacagaagttccagggtttgtttgtttgtttgtttgtttgtttgtttaatttttaaagttgctatataaaaactaatcttttaagggtaagggactgaatctgttctcccattatttatgtcccagaagggtcagctctgtgtcttaaatcacataactgtatgatgctctgaggcatagagttcctacatgggggatttgcttacataccagttggtactaactttatagacatgaaacggggcagcttgaagtactgggtaatttatgagatcctaaagtttgcatagtcatgttaatgaagcttgccttctgacctcagagtctgtgagaatcatgtgactttagcctacatatgaatttagtaattttgtctcttctttcagagtgtggcggcatactgactggtaattatggttctattacatctccggggtaccctggaaactaccccccaggaagagattgtgtctggaaccttctagtcagtcctggctccttgataacatttacctttggcaccttgagcctggagagccacaatgactgcagtaaagactatttggaggtaaaaacaaataaacaaacaacaaaaagaacaactgaaaacccccacgtttcgataggatttgatagagtgtaattagtactcaagacactgtggttaatgacgctcatggatggccctcctgtgttaccaatgcttaggcagctgatgttaaatctctactctactgagtgtggaagagcttgccttgcatccccctgtctcttactggaaattcagactcctggagtaataataaaacctagcaatgcttgtctttttcaatacatattttgatttttagttttccaagacaagccctcaagatatcacaccacttgactctagggggccataatggttctctaggaagtggttgtcagtgttgaatcttcctagaaaatgttgacaattacccttgggaggaggggagtcagtctcctctattccattagcaaaaggttaagatatggaagaggaaaggggccattacattcacatctcatgcacaaatagatacatcaaaaatgtggttctccatttgtagactggaaaggtcaccaaggagattatttcttaggtagttcctacacttttgccactgtaaatctcagtaccccacaacactgtcaaagagacaatgagcttttctgagtccattagagaaggatgaagtgctgtggaattattcataaaggatgaaggatgcagctgtcatgcaggtctccgaagttgaagtcattagtcattagcagcggtaataatgaatttgaaacctttgggaatgattcaaatatcagtttctccttggaaagtcttagcaaaatatccttttaaaagttgacagtaaaaagtgagttattgtgaaattaatattcaataaagcctatcaaattaagattaaagcctttaattcttacatattaatttctgaatagcatattatagaaagtatcaatcacctggacaatattgaactccctctcatttctcatcagtgtatcaaggaactagttacaagtaaaaaataaagtaacactgccttataaatttgctgccaatggaaaaattgatttgagtaaaagaaattgaccataggaggatattctctggtttattcactccttggtgctctatggagtatagatttttacaattgtgtcagaattatagagtgctcaatgtgatttattcaacacataaaaagccaaccagggtctttaagggctggagattacaagagaccctgggtttaatcctcagtcctatgaaaacggagagcaagggggagaggaagacggggcagaggagcagagaggaggaagacaccatagactggaggttctctcacgggttggttgggtaggtgagatgtcttggcttcagcaagcccaaagacctgaatttgatgacctaatctcacagtagaagattaaaacctgtttcctgaatattgtcctctgacccccacaataactccctgcccacaagtacatacgtgtatatgcatatatctacatgtattatatatatgtatatatatagccatacctataatacatgctcacaagcatatacacacagaattcacacacatgagcacatagaaaaggagtttgtaaggtcacgctgtcagcatgcagtatgtactgtgtgcagtgctggatgacagtcacagggttgctctttaaaggcagctctatgctctgtctttcccatctgtatctccctgcatatcccgtgtacccacacaagttgcaggtcagttcacatcactacaacccattcttccatttcctttgaaatttcattttcttcttcgaaattaccaggatttctttactttgggggagggagaagcatgaaagaaaaaaaaatgagttttacatcatcctaagaaaaatccaaagtatgtattcaaccccagagttgaaattccagcagaagatgagacatctgacaggactgtgaggacacattctttactgaacacagactgtgaatttgtattaatatgtatatgacagaaaggcatccttcacttgtaaataagtttgttaaaccagcactttgggttgccctgccttgctaccatacttaagtgacagattttctgaagcttatgtctcaagtggcttggttaatgagaacctgacttcaacttaatgacttgtggtctttttgttgttgttgttttagattcgagatggtcctttccatcatgaccccattcttgggaaattctgtacttctctgtctaccccaccactccagactacaggtcccgcagcaagaattcatttccattctgactccgagactagtgacaaaggcttccacatcacctatctaacgacaccatgtaagtaacctgcccactgaggactgactccaacttgggagtgtgatgctgttctcacaggtgcttgtcatgcccatgcctaagctgaaggcgttctgaggttagtgacacaccttcatgagtacttcttacaccacctcagattcagtatcttcagaacattagacactacaatactccttagcccttcaactatgcgatcaacactacgatggagaccagaggcacctaaaatgaactaattcagaacctcagatctctagtggtgtttgctgttttgttgcatgcaagattgttcatgggaacagtatagtctgtctgaaaaacgttggcttcattcttggatcaagtccagtgcgcagaagccaacatccaggaaagtattgttcccgttactagagctcactcccatacacgtcactatgatgctctcagttccattcataccttggaacaaaggacaacaatgaagtagtgtatgtttttcatttgagtgagttagagaagtttgtttttgacacctattattgtgttttagagaggattccttgtaagtctctgtattaggaaaaataataagcagcccacccccccctcgtcccttctccctctgctttggcttcaggttgaacgcacagtcagtgttggtaattcctacagttgtaagtactattaatggtgacatgctgctcttctataccccctctcattcaatattcttctcttatatagttatatatgttattcagccacaatattctatcaagtgacttaaatctttatggaatgaagcaaagcactaatgtgcttaaaaagcaatttacagaagagagccatagattgggcagttcaatcacatctctgtatccacttctttggtctctgcggggatatgctgaatatatataaaactggaaaaccttgcagtgggtggcatgggctcatacagggtggaacaagccgggtgggtagggaggagctaaggttttgaaaattgaacgtaacggacagaggtcagccagatgctatcctcatgaccattctttcctcctttgttctcttcagctgatctgtactgtggtgggaattacacagacacggagggtgagctcctccttcctcccttgactggacctttcagtcacagcagacagtgtgtctatctcatctcacaaccccaaggagagcaaatagttatcaacttcacccacgtggagctggagagccagaggggctgttctcacactttcatcgaggtaacctttctattcagttacccttgggggacactcattacaattttcatgttctgtggagtggtggtcttcaaatggctgtcaagccaggtgcatctagatcaccagagagcttgtcagaagtgcttgcctttgctcagcatcactgcgtatgctgagggtgggaagtcaaagcagagagtaaaagagcaagagttctcagaggatctaaaagaatctgtctaaaacagacctaagaaggtgaaatagcaagagcttcaaaatggaggcagcaaagtgagaaaaggaaagtggaagctagaaactcagagtagggctacatcaatggagctcttaatcactaaggcacatgcgcgtgagtgaacctaactagatttattgatgggattagggcttcagagaggttttctagagcaattttgtatgtcaggcatcataacctagagagagtccaatatttgcccatggctcccagttagtcttgacacagacatgtcctttaaattattatgggaggggatcacaaaactggcactcagtaacttaattttgtaaagcagagtggctgactattttgtagttataatggaacttggttaataatttagttcttattttagttctgttgttagatgtctatataacttcaggcaattctttgagtattcagttccttcttcagttggatatcttatcttttatttaacctttgtgagaataaaatccaggaaaggacagagaaagaaagccttaaatgttattacaaaacattatacaaatataagttttcctagaccaaattttttctcttctctacatcataccagttcagaatcagctaaaaagactctactgtagctatctatacacctatttacattctgatgtatgcacagcttcataaggtattgatgaaaattatagaagattgctatcttaaacaaaaccacccattcacacatattcatgtataaactcacacatgcacacacatattcattcacagacagacacatatacatgcacacacacacacacacacacacacacacacacacacccctccacttaagtttctccttctaaaattacattttgcccatggtcagtgtaatatggctaaagaatgatgaggtcaaagagagattaatttttagttcatttgttcttgcctaagaaatcttttaaattgtatagaacagtattatagatgtgacaaaagtcatctttccataatagaaggcagtgactcattaatattttataagtggctcaagccatcaaaactactgtgaatgaaggacacagaaggtaataataaaagttcaaatttttattccagaaaatgcgaatctgggattgactaagaatatctaaagtatatgacattaaggccaaggcttggaagtaggctatagagggaaatgatttcataccccatttatattttccctagaacctgcatttcactcagggaactgtaaaagaagcattacaggagagggtgacagactggtgtggtatgccttctagccaaacagaggtgtttctgggaaagatcttccttcttagaaatgtgatgcatccttgcacaacttcagaaaacagccctgactagggtggaaaaagaatgaaagaaagcagacacacagacagacagaagagctgggatggtactctctgatggagaacctgcagcaccccagaagcttagcttactaattatattcagttgggtggagaggcagggttcttgcatacagcttaacaagaagctggaatactacttacagacaaacaaggaaatggaactattgtatataaatgaacaaggagacgggtttagctggcttcagtaggagcaatcaccataggagaggagtcttcaggccatagatgtccacagggagaaagggatggtgaacgtttcccccccacactgtcaacatctgcacacagggcataggaaggctttgagcctcatcccaggggaaagctttgatattttctcgtgggtctgaggctaaggtccttggcatggccacttccatatcaacaccacacaatcactcagaactttactcacccgggcctcctccactccccacagacatggaaataatcttatatttatgataaaaaattaaaaatgtattatacatgtgagaaatatactatgaaagaaatgtatagagctcttgacttgaatcctattatgactggttggaaatggctcccctggggacagtacttagtgggtatatggttgagcagttggcaacagaaatattaaaacaaacaaacaaacaaacaaacaaacaaacaaaaaaccaagggtgccaggtacagtggccaacacagtcccagaggctgaataaggtagacataggataaaccaaagccaaaacaaaagaaataaaatccaaacaaacataaaaccagactaatgtgactagaatcacaaagacagaaagaaaccagtaagggaagtgctaagctcttgtctccatatataacgataaagagatgaagaggttggggtgtcttctgagagcctgaggttattatcagtctcttagcattgtgcccaccccagtgagtggccacgacagcacatccacgatgagaatgggaaggagaagagagaggattgcatgctgagcttgtaatcaggagagaagatacttctggaaaaaaaaatagatcacattttcttgatcttaaaaagttcatttaaaaatcaagtaatatcattattactcagacactgcctgttatctctcatcatctatcccctgcatgctattctctcatttggggtgatgctacagtcctttcctctcttgccccgattagcctaacacagtgtctaagatcaggtctctctgctattgtgttatccgtcagcctgcaattcaattcacagggagtatgacttcacagttcatacattgaacgttaccatacggccaggctctcttttccaccctggtatcgtccaaacctccttgtctcagaatatttgatttgctttgagttaagatttcatacttaaatggattttagagtctggagtgtaaaaacaaatctgggtagttagcacacagaaagacacatgcgagcattaagccaaggctttgagacctgatctattccacatgtcaaagcctcttgctcactcagctctgcagttcacatttaaaatttcgtgtgaactgtgttttgcagcccagttaatcttagctatctgtacaggaaatagttcctttacaagaactcagggtttaatgagtactttttctttaggagctagttcaacctctaaatgccatttgcaatacttcataagcctgagttattcgttatatcctggggctctgggtttgtaatactcagcatttacaaaatgaataaataaatcctagagagacagtcagcagtgctcacttgctaaggaactaaccttgcaagcacgagggcctgagtttaattcctaacccatgtgcaggaacatgtttgtaatcccagtgcctgggatatttaggacaggaggctccctaaggtcatccagactatcgcagtttgtgagctccaggccaattagaaacttcgtctcaaaggaggcagatggcattttttcaggatgacacactaagggccccttggcttctacatgtgtgtgccccctcacacacgtgtgtaccctaacataaatgtgcacctgtacaaacacaagcacccacacttatacagtgaaacaaactaaatcctggagaaacccgagcctcgttcacacaacactggtgttttgcaccaggacctgtagttcctttgcaaatgtgaccaccaaattggtgaatttactgtactccctctgcaagggaccattgtgtgatatccatgacttcttaaaagaagggaaacttggttactacaaacccggtttcaatattagttatctttctctaggttgttttatggtaagcaattaataatgttccccaggcaaatcaaaagtgataacaagcaaaatccacctcatggttcatttgtgtgtttatttcctacccctgtcaacatgttgttttggaatctgttctgcttgaggctctgttgatatggctttggctttgtaggacccagactcctgatttctcaagaggaaaagcaaagaatgtttgagtcacccactgacagtcaaggcctctatgtacacaggttcatcacggctactcacattcctcaaggctgagcaattgctgtggcaaagcccatagtcaatgggaaggataagtgttcatgttccatcgggaggcatggcaagtcacatgacagagaatagatattcaatcctctcacataaaagcagtcagtaattacgaagtatgagatagtctattctagcttccaagcacaaagaaaagagatttcttttgggtgagagtacaaatttacaagtgcttagtcattaagtacaagtgaatttgggatcagttcaagcagttgataaattttattccagtatctctctttaaaatgtgatggttaaagtactgctgtgcctgaggtccagagagaatacaggctttcagaattaataaggtttccttccacaaagagaaatacagccaaaatcaattgtaccttccaggactagtgcccttgaggcctgaaagcctctctcataacatctggatggcagctgcattcccttgctaacgtccttgagcttcattaatcaggacccaggggaccggccacttcacctagctccaatgctgcctggctgtttttcttccttcttgtcatcttctaatggactaatagaaatgagagacaatgattgtagaagaagcaaatagaacccaggggatgagagcagggtaccatattactcgagtttcctgtgttctagtcttcgggagcagcagtatgtatgctgcctctgttaaagactgaattgaagattgtgcactctcacgttaattgatcaacaggaatgtatcaaatgctataaatgcctgtttacaggctttgttttgcttgtcttttggtttggtttggtttggtctggtctggtttggtttggtttggtttggtttggtttggtttggtttggtttggtttggtttggttttgtgagatactaaagggacactttcttgtccctctgaaacttgcttttcagtcaagtagcataacttgacttaagaataagaaattcgtgttgcagatgtcaagagcttagactaaggaactggtatgagcctgactcagtggagtggcatgcgattctctcacatggctgaccttttaaaatagcttccgttcttacctttgcagaacatccttgcgtatggatccacatgcaagtctgtctgcatcttagacgctcttataggtttaatgcccataatatattactgacaagcatccttcttgaactttgtacttctactagttttggatgagaggaacaatgtcacaatatcccaccaatctttcccttactagctactgcctttaacctaaataattcttaatgaccttggactaaagacatgtctcctgagtattccataattctttgcatgtatccgtcttagagcactccataatttcctgcaagtgttcagagcacttttctactatcagattgctgtgtgtcattattttactattttgaaatgaagttcatctatatagatttccatgcactgtattaaaacattgttatgagtaaacttaagtcaacaaaataaataacatttattccaatatgtgagagacctgggcaagccccagcttgagataaaacacagtcagctgttcttcccccaaaactgccaggatttctccacaataaatgtacactgatgaaaacagtattttttttttcacttgtgttccactgattgtcctggaaaaccatgaatatttaaaattcccaaaagtaccttgtttaatacctaaacatggacaacattttgtgcttcagagcaatgagtgaaaatcacacagggtgtcagggaacccttgggaatgaccatcacatgtcagactctctaatgaggtgattcttgtttgtttgaagacagggttttcctgtgtagacctggctatggtggaactcggtttatatagaccatcacaaatgtggagatgctcctgtttctgcctcccaagggctgggattaaagtcatgtgccaccaatgccccgctctatactagtcatgctccaccaacatcagaataatagataaaaccaaacaaaaacaaaaataaagtttcccagattcctaattgtggtactcactgagccgcagtgttaagtgacaggactgagacctgctcacgagtttctgtgagcactgacggtcccacggggctcctagcagcacagggctgcttagttagcaataccttgataatgctaattgagagtagattaatattggggctactctgccctctagaataattttatgaagctagagtctcatgtatactctttaaacaattctcagctgtggagagtctctagtgtttcaccttttcaaatgtcagaaatatcaagagctcttctcaagtcaatattttattaccagaaatcttgggaaatttcactgccgtctcacatattccttcccatctcattagctaggcttagatggaataacttgttaagattatgaaggcagcgagcttgtgacagatggggacataaggggcccactcacacaggtcgtggccactgaactgaaaggtgtggagtgttgccttaaaccaattgattgtattggaatagtttgtttctcttctctcttccatactcttgctttaatattcattacatgtatttatttatttgtttcattgtgacggtggtaggagttgtactatggcagacaggtgggaaccagagaacaacttacagaaatcagttttctccatctaccatatcagtcctgggggtccatctccagccatcagctttggcctttacccaccgaacctgtccattaggttttaatcaatcaggaatgccaacaggtgttttatcacttgagctattatgttgtttggtatattaggctagcaatagtgtgcacatttagttttctagaactttgtttaggattctgtatatatataagtaagggaaattgattcatggttttaattttacttatgttgggatttgatagtagagaattgtgccgtgcttgaggccttatacatggggaattatctagttcttaaaagggcagaagacttagcaaatgcacactattctctctgagtgcttccctctcaggggaagcaggcggagaagctacccagcaatcctctgttttatccatggagcagtcattcccgttttcctcttcttcacatccttttactgatttatataattttattaaaatagtttatcttgagcattcaaatacatagacaaacaattgtatacaggattgcatttaattaattgcatgtttcttagactgtgtgtttgtgacttgtttataaatttttttattttgtatacttagcaggcatatattttaattttcttattagatttgtctaaaatttgcctttggtatccccattcccaactctcctttaaaaatctgttcttcagtacatttatgattctactttctattttaataatgaggtttaaatcttagcttttaatttttaatggttttattctgtttttagcagattctctctcgcccttctctctttcctctctctctctctctctctctctctctctctctctctctctccctttctctctctcctcctcctcctcttcctcttctcccttgttcgatgaccttcctatcattttaaaatgtttttggtaatgaactgagtttattccttggattgcaaattcacttaaactttcatttcttgatatgctgtatttttggtttttgttgattgggcaaattgtctgcagttacagatttatggcctcgttgatgttatggaaattaagacattttaagaatcacatagttacaggctgtattgacttaagattgtcatcaacatttgataccagttgtttgtattaaaacggacccactgactacttctaaatataatatacacactactaaattaaacttgtatttgttttgcttgtgctattgaccagtctccaaacactactacatctaccaaagtgactttctaattagcaatacaaatctttctttaattttctgcttaggttggagaccatgagagcctgcttcgaaagatctgtggcaatgaaaccttgttccccattagatcaatttctaataatgtctggatcagactgagaatagacgctttagtccagaaggctagtttcagagctgactatcaagttggtaaggaaacttctgcttgtgtatgtgtgtgtgtgtttctgtgtgtatgtgtctgtgtgtgtatgcatgtgtgtacaccatgtgatgatagaggccagggtgttggtgttttatctcttcttcatttcctttccaccttattgagacagagtccctcactgaacattgaactctacgatccagctggatttgctggccagtgagctctagggagccatctagctctgtgctttcagcccccacgcccagggctggcattgcagacacacactgttgtacccagcttcgtgggtgcttgagaacagaatgcaagcatatacaacgagcactttattgactgaatcatgttctcatccctatctatttttaaaattatcttattattttacacgaatggactctttgcatacatgaatgtctgggcacagcatatgtatgccatgctctcagagaccaaaagaactgtcaggttccttgagactggatatacagctggttgtgagttgacttatgggtgctgggaatcaaacctagatcctctggaagagcatccagggcttttaactcctcagccacctctctagccccctaaccatcccttcctacttggtttttaaatgtcaaattcacacactattctaacattttaatttgagttattctatgttcttgaatggcaggaaaaatagtcccacaaaagtgtcatattctgctggttttttagacagatttgtaatgaaattgaggtcaagaattctttatttctgagctaacgtggttatcatttttctatttacagcttgtgggggtgaattaagaggagaaggagtcattcgttcacctttctatcctaatgcatatgctggacgaagaacctgtaggtggaccatctcccaacccccaagagaagttgttcttcttaacttcaccgactttcagattggaagttcttcttcctgtgatacagattacattgaggtaagagtgaaagaccactgcattattcctaaaggaactatatacatttatgtgaaaaggacttgtacagatcaaatatagacataaaatttcctagcataatgctacttaatagaattcagtatatatatatatatatatatatatatatatatatatgtgtgtgtgtgtgtgtgtgtgtgtgtgtgtgtgtgtgtatgtgtgtgtacatatatatatacatacatatacatatatatgtgtgtgtatatgcacatatatacatatatgtgtgtatatagacatatatatgcatacatatgtatgtatgtgtgtatacatacatatatacacacatacatatatatatatatatcatgatgaaagcagatttatactaatgtatgtagattaatatgtcctaaaattcattgaacattacagtacaaaatagaacagtatcagtaaagtaaaaaataacattatcacttagtggaatgcacaaaaagcatgtgacagaatctacatgcatcttataataaaaacagtcaataaaagaactctcttactttgataagaggcacaaaagctgccaagatgccatggtacacagtgatagaggtaccacatgctttgcctcagtgactggttggtagacagccttgtcattgccacacttctgctcagtattgtaccggaaattctaactagggccattatacaagtgtaaaatataccctaactggaaagcaagaaataaaacttgttctgctcgtggccccaaagaagaatgatctacacgccctccacagttaccggctgccatgagcctcaccacaggcagcaattttccaaatgggtatttaacaaaaattaacttggctgtatctatttttccttagattggtcccagctctgtcttgggatctcctggaaatgagaagttttgtggcacaaacataccatcatttataacatctgtatacaatgttctttatgttacatttgtgaaaagttcttctatggaaaatcgtggcttcatggctatgttcagcagtgagaagttaggtaggagcatgtttctctctctccttttatgctgctatcagaataaatggacagttgtacagggatgtttatgtgtgtaaggctctaggttcaatccctacctccggaaataaaagttccttacaataaagaaattatataaaagtcgatgttttccctgaaaaattatcaagtacacttaaaaaaagactatactttcaacaaatacttaacaatagttattgcatacctattaacaaaagaaactaagttattataagtcacataaaagaatagcattctctctttgcacgtttaatcaatgataagcacattttattttggagcctgtgcagattaacattaactgttgtcacaatgattattgcttttattttgggactcatgtaactcatttattaacttctgtgatgatgatgattgttttattattactaattattactcagaatgtggaaaagttctcacagaatctactggaatcattgaaagtcctggtcatccaaatgtctacccaagcggtgtaaattgtacctggcatatagtagtccaacgcggccaactgattcgtttggtattcagctccttttacctggagtttcattacaactgcgcaaatgactacctggaagtttatgacactattgctcagacgtctcttgggaggtgagaatgtttgtctttttatgctgaactttgattgtatagtgtttatatttttgtacatagatgaacagagactataatgcacttaaatcattttatgtccagtttattttactttataaattagcaacatattttgaccttacataccattatattttgaagtaaataaagtgcatagaatagtaaggtcggccttactgatgaatagtatacatgatttagtatagtcacgatttcatgggcaataacacaaaatatccacctggtgcacattttttaaacaagcagtatgacttcgactatagttaccttgctatgtaatagatatctcagaatttcttctcctttgtatcttgaattacctgtcttttaccaacacctttccttctttacccctcccccaattactctaggtgctggtaaaaccattcattacattccctacaactttagaatcatatatcagtgagatcatgtggtacttctgattctgtatctggcttatttaacttaataatcatgccctccaagtttacctattttgttctgcatggcaagattttattctttataatatagtgttctatggtatttatatcaacaccacatcttctttattcattcattcatctgtggatggatacatctattgatgtatgtcttcagatagtctcagtagtaagatcacttgaccataagatagttaacatttttaattttagagaacttctatatagctttccacaatggcttactcatatacccactaacaatgtataaggttattttttcccaatatttcccaacaattcctctctctctcttttgatatatatttcaacagtaataatggaatgagattgtgttgatgagtgagaatcactccattggctatgcatatgtttgaatgcctgatccccggttagtgcagctgtagagaaggattgggaggtgtgggcttgttggagtagatgtggccttgttggaggagagatgtcactaggagtaagcactgaggtttccaaagcctactccagccgcagtcttacccagcctgctggctgctgatcaggctgtaaagccccaaactagcactctagtgccatactgtctgcttcctgcaatgttgataatggactagccctctgaaactgtgatgaaggcctcaattaaatgctttcttttatcagagttgtgttgatcatggaatctcttcacagcaacagaacagtgacgaagacagtgatagtgtatcattgtgctcttgattttgcgtctcattgttgatgcataaataacaccggtttctcatagatccatgattcatctctatgccttgtttgtgataattgcctattcagggcttttgtccattgtttttatctgagtatttgcttcctgttgataatactaagtgatttgtagtcttcatatttcttgggtattaactgcttctccattgttatgtagtttgccattaattctcgttctatgggctgagtctccattctgctgtgttcttagctatggggaagatttgtatattgctagaatcctacttgtctgtcttggcttgcctgtgcttttgaagttgtagctatagaaatccttgtccagaccaatatcataaagtgttttccctgtgttcctctagtctagtcacttcatttttcacacttaacactatttgaattgatttttatctcattgttttgtatatgcatgttttagttttcattatttagtaccagatgactgtgtatagtctgtaactctatgttttgattttcccatgtttcccataccttctagatctatttgatagttataattattttaatatctttattcattcagtgattatgtaattacttgttacgttttagctgcttattctctcttattatgagttgtactttctttctttttatatttgataatatttgataagccgttcagaatttttaattttatgtttaggacaccagccattttatacattcttgtaaatatgtatttggactttgtcctggaatggtgttaagttacttgaatccaagttggtccttttcagtttcccttttaattaatttatttcctgtccttgaggtttttcccttttcatttgatatttagtgtcttgagaagctcttatgtattttccctagcgtttcagatgtttgagtgcaaagttaaacctggcctctattattatgtttgtgttgaaagtagaggtcctctaattgctttttgaacatttaaaaatctatctatctatctatctatctatctatctatctatctatctatctatctatgtatctatctatctatcgtttaccagtttcttggctgtatgtatgtccctggatcatatgcatggtgcccacagaggcccgaatctgatcccctgagcctggagttttgggcagttactactatcttctgtgtagatgttggtacttgaacccatatcgtctagaagatcagctagtgcacataactgctgagccatctcttcaacctcctctgattgcttctctttaaagtcctcttgtatcttcttttcttctcctttattagctttgtaagcattatctttttaaagtagtctctaaatttcttccctcggtctttactgctcctcaccttcttttgcttcttatcttagccttccatctaaaattgtctttgtctttctttaaaataatatatgagtatcttttaaccatgacaaaatgcagtttttgctgaagggaataagctttaatgatcatgtcccaatttaggatgcaagaccatgtgtgcacagttatttaatctgtcttctttcagtcatattaagatgataactctctgttatcactaaaatattattctacatcaaacttatttaattttcctgcttctcatagtcaacattttagcttatttttgcttccatattattttcctctcttgttccaagcatgcgttgtctctagatttccctttttctaagctcttcctcctacaggtgtttctccagatgaaacaccgtggcaccgtgtgatgtactatagctctgtttgggggattatgagaatagattttctgagtaaagcttccttcgttctgaagggacagagacgtggtttcctggtcacactcttacctcttcatacatgagctgtttaaagacagcagacaacttacgcagaggtcactgtccaggcactgctctcaatgcctagcttcagcgatctacctgatccagatgttcagaatgatgtgaagtctacggagaagatgacccagaccaattaaaccatgtgtccaaagtcacagtgcacctgagtggcagagctgtctagggctctgctggatggttttggatgctttaatgtggtagtaaatacagtaaaggaacataattcctttagcataggtctaggaaagagttgctcagtgcgctgacagcaggtgcctgcagtctgtgcttcctggtctcagaacatttttcctgcatgttaaggcattaggcgtgccacacaactcttccactgcgtttctgttattactgaaatatacttggtttcaaggttgatgtgaaatagataacagcccattgtcatttgtattattttcgtctttacatggcctattgttcagaatataaggtcaaatctactaatctgtgtctctcttctttctttctttggaacagatactgtggaaaatccatcccgccttctcttaccagcagctctcattcaataaagctgatattcgtgtctgactctgctcttgcccacgaaggcttttccataaattatgaagcaattaatgcatcatcaggtaacatttcctctgctgcaaaagatgtttaatatctaaaacacacaaatacttacttggagtaaagtataaagacaagatccacccaattaaaaatagggtaaatctgttagctaaactgtgtgctcctttagggattctggaccttaatgtttatatcagggttagaagatgtttgatacagaaaagtagcatccagtgcatagctacagctgtcacatgttacccctacttgccaagcattccacagcttggggcatttttctgggcctggacatattcctcttgagagtcttttgtccagccacctttgaggtgtttatcttcttacacctgtattcctaacataaatatagaaagaaaaaaaaattcttactcaaaatccctagccagtttttcacttatttctcctctagaaattttggtcactatactttaatccaggcaaaagtagttcagcttctgtgttctggaagcatggctttaaactacaaactgcgggagaactgtatacattgatcactggtgggattcactctagcaggtgccccattatctagcccaagcacatgtagaggtaaagcgcaaggatttaaagtatggtgtgttgtgctatgtaactgacattttcactgaaccttattcaagtggttaacagccaaagaccaaagtggatgtctcaggaaattacagtgtatacacaattttctatacttctgtagtttcatctctctcatatgtttggtcccaaaccacaccaaatattcgatttggagtaaatcagttgaactctgtggaatacaattttcttatctgtgtaattaaaagataagatttaatgatctttcaatgttttctggttctaatcttctgtgaacacaattttaatttgctgcatgaataaactgcttatttcttaaatagcatgtaatgtgggcagtacctcctgaaaatgtcatggcgttctctgcactagtatataaaaatgaagcatagttctgtaatgactgaaatgattgtgttatcactacactagcttgggaggcagtatgaagggaagagacagctaggagccattaatataagctggggatgaggaggataaatttaaaatttaatgaaattgttcagaaagataaaattcctataaaactcatcaaagtaataggtccagtagacaggaagggaaactgatacagagagtagggaatggaatgtgctcagtgctagcatgtgctcagcatgcatgactaggttcagttcttcccagtacttctaacataaaagaggaaacggaagggaggaaaccccaagggctcaaaaagaagacactgaaggagcaactccagagactctacccctgcttccctgtgttagtcatgactccagcccctacttggtctagacagagcagaaatcacagaaaagagagtgcatccttttcaccacttgactgatgactatgtatctacctttttttgaatgagctcataggactggttaacacagtcccaccatttgaaatagcaatcagatgatgagacccagaaagtcatatgggtggctgggttgcatgagttgttgaagctggtcctgtagtaaaactcagagcacagctggctcaggagaccagaatagaggtggtggtggtcaggcagttagctaatgctcccaggagcttgggtgaaatgagctgctgactggaaagacagaggggaggactctcttcagctagcgtcttcttctggctaatttctgtagactgaaatcatgttggataaaagcaccagaggacaggcaatcattggcctgtaagctatttccttgttccaaaagaagttatttttggagtaacgatgatggtttggactgctgaggtctagtttcttaccacagcccatggacatttcccttgactctggcctgctttcatttaatagagtcaaattttcctgatttgaatcccgttacccttctatctgtagttcctgcaataagtctatgatgtcagcctttaaacatgtgtttgggagtaaggagattggcttcttgttcatactctgactccctccctaagtatttggctgcagctctcattcaaatattcctgagaatatatagaaaacaaatgatataacaaaagtaacgatgttggatagaatctcataagaactctttaccactgattatgacatccaacatttattagcatgaagtaaaatatttgcatattgagataatataattggtatactttacaatttaaattattatctgatatcctataacaagtattacttatccactgtcttaatatagaactagtaagcgaaaactttacaagtatagagaaaagcatatctatataacgactactccattattcttcaaattaattcctgattcactcatgactatattcattaaaaatatgaatgagaaaaagaaaaacagagtggaaattatcagaggtaccatacaaagttagacttctcttcatgaaaactgtctaaaaagctcagtaagcatgattggattttatttttgtgacgtgtctagaaaatataagtacagtctttcccaattaatctttgaatggaggcaatatcagtctagaatgttgaatctgtcgtcccaagaataaacagctggctggtttaagagccaaactaagcaaacaggcttcactatgctgcctgtttctgttgtcattctctccagggctacagcggaactatgaggaatgtttcttacattttactaagagaagagcttcaaaattacccagggaagtagctagcatggtcccaagcacaatcttatgagcaaatatccatataaaaaggtgaatccactgggatttccttctgtcttacactaccgtgcaagttctcatcagtcaccttggagtgagcccagaaagggaaggcaagaagttaggaagtgataaccaagagggtcacaagggatttatttcaaagaaatgggcagagcacgttctgtgtcttttcttatatctccgtgtggtaagagcaatgttctcagattagaatggtcattttaaaacatcttcagaaagaagagattagctcagatgttatggttataagctcagatatcattcttcaattagaaattctaattaaggtctttggtatagttttacagaacaattcaagcagatctagttgaattttgtctttatagtttatttaaaaactgttataaaagatagtaaagaactattatactcatgattgcaggtcttattcactgcagattgaaactaaggccagagagtgtctgctgagtgacagcttgatgctggcttgaagcagcttgggcaggtttcaggcttcccttgattgtatacctctatctgaaatttctcatattacatgctcaaatatttttgagaaggtttttttttaaaggaaatctattaatctctaaaataatttcctctagtaaatcttaactttttttaatgtttcgtacaaataacccatcgattcacttctaggttttgtgtgtgtgagtgtgtgtgtgtgtgtgtgtgtgtgtgtgcacatacacatgtgcacatgtgtctgttgggccttagaatgaaaacagtgcttaattggggtattcttaatcccttacaggtctaaattgacatttccactgtagaaaactagggatcataggctgagggatggctctgtgggtgaactatctgttatgtatgcatgagacctgagtctagatcccaggtacccatgtaaaaaagtaaaaccaagcctggaagagcacacctgtgctctcagtgctggaagggtaggggcaggaagagtcccagggttctaggtcagataaggaaccctttctccaaaactaaatagaaatatgattgaggaagccatctgacaatcaacctttggtctctgtacattccctacacactagtacacatgtgtacacacatgtacacatacccaaaagagaaactagagatcattagagagttcaagatttgaaaagagtccaaattttatctggtgttcaatctaaatgaattttaaaactaatctcaaagtctcctattcctcttccacacatctttaactagacatgatgactatgttgtttcgatataaaaataacattatgataggctggaaggaccgttcagagatatgtgtgtgtttagaccgtaccagctatgttaaaaaggtagatatgcatgtgtgtacctatgatatcagggttgggacagagggaacaggaggactcctgggattttctgaacaaccaggcaggcagaatcagtgagctttgagtttagtgacagatcctatttcaaaaattaaggtggatgagtgatgaaggaaacattggtattgatatatggccttcatgtgcacatacaaacttgcacatgaatgtgtatatatacagagacacacaaattatattacatatgtaaatgacatggctttgtcagatttaaaatgtgattgctaatatcccccagagttctgtaatagctcctctgcctttattcaacagcatctgatatgtcatctgtggggtcaaagaaaaggcagtgactgtaatcacctggcagcaaactgtagcaaaatgttagattgctcttccgtgagagaggaaaatgtgtaattttatcttccctcacatctttgctttgaaagtatagacttcaatacacaatgaaggcctctgatgtttccatatcagtttattttatatttagaaaagcagttttcaagctgtgagtctcaaccattttgtggttgaacacctctttcacagaagtcacccaaaaccattaaaaaacagatatttacattacaattcataacagtagccaagttaccattatgaagtagcaacaaaaataattttatggctgtgggtcgccacaacatgaggaactgtactaaagggtctcagcattaggaaggttgagaaccaacgatgcagagaatctgagatgatatgcattcactcagaaaccaagttttacatgatcttggaaactatgcctccctaagcaatgggttcccctgtccacagtacctatctaccctcttcttgtgccttggtctcagggagctaatattgccatggctttgtgagttgaaggactcccggtgattcccagttttcccattggccacctttaattctatggtgtaaaagtttttatgaaagtgcttaatcaggcagaaaaacatggtcatttttagaaaaatgtagttttgtaatttttttattagtctacagagtttatttttgacagtatattgtcttttgttgggtatctattaacctgtgtgtgtgtgtgtgtgtgcacacgcgctcaagcatgtgtgtctggaatgcaagtgtattcttgatcagatggtacactcaagtctttttcccttcattttatggctaatgggcttctgttttctatatagaaaatgtttgcttgtcaaaattatgagaccatccctctatgtatcttctagaagttctatagcttgaacttttaggtctaaaattcatcttgatttcctagtatggtggtctaagtttccaagtccattcacttatgaaagtgatatttagtggagcaaggccatgccttaaactcatctccctcaactctacctacccccccccccaacatatacacacactggatttcctttaacccgttgctgacaattgtccaagtatattacatgtgtgcctctggaattcttactctgtcccatgatgttcatattggaccttatagtaaaaggagagtctgttatacaatattattggcttcagggagattttcacaacagcatttgcatttcaaaatttttcttttggtgatcttagatcctttatattgccatacacattttagaaactgccttttgggtttttttttaaccatttaaaaaaattgactgaaatcctattgaattcatagatcaattgggatcttgggacattgcaaactatgtcttccactccgtgagcatattctaacttgatggctagtcatactttctctatttctatgagcacttacttaaagctctgagtgttgatttttgcattttccctaggtcatcatgtgctttatgctgttgtatgctgctttgtgcattatattccagattgaccaatacatgcatattaaactgattttccagatattaatcatgtattatgtaggcttttaaaactcagtaccaactattttttggatacaaaacatacataaatggtcccaactgtgaattgctgttttgtgctgttcttcctttctccctctttcttattgcagtgagcaggactgtacattgctcagcagaggggtgaggctggacatactctattcttcattttggcaagaatgcatttaatcttctattctttaagaactatgatgggatctcatagatttctgtttttgtcttgtttattgagagtcttcatcaaggatggatgctgattttttctgaatgatttaatcagaagattctttttaatccagttaatatgatggattacttagattgatttttcccacatcaaacaatctgatactcccagtgtgagcaatgcttgctataatatcatcttcacattctctggaactatatgcttaagttttttttcaggtattttatctgtatttatgaggcatgtttatctgtagtgttcttgttgcaagtttgtcttgtttgagcatagcagtaatatttggtcttaataaatgagctagggagaatcatctcttcttatttcccaagtctgggtagttttaatatttccttagtttgcttgactatcaccaggggttattcaaatacattgttttctttgtagaaaacttttaatgacagatagaatttcttagcctgattgtggccatggaaggtgttattattttcttttgagttagctgtggcagttggtagctgggaacaaatttgttaagtttatcacactgttcttttactgactggagattctatagtgtttcttcttctttcactctttttttttttagtagatattttcttcatttcaaatgatatcccaaaagtcccctataccctcccccccccgccctgctccccaacccacccactcctgcttcctggccctggcattcccctatactggggcatataatctttgcgagaccaagggcctctcctcccattgatggcctactaggccatcctccgctacatatgcaactagagacacaagttctaggtgtgtgtgtgtgggggggtactgattagttcatattgttgttccacctatagggttgcagacccctttagctccttgggtactttctctagctccttcattaggggccctgttatccattcaatagctgactgtgagcatccacttttgaatttgccaggtactgtcagagcctcacacgagacagctatatcagggtcctgtcagcaaaatcttgctggcatatgcaatagtgtctgggtttggtggttgtttatgggatggatccccaggtagagcagtctctggatggtccttccctctgtctcagctccaaaatttgtctatgtaactccttccatgggtattttgttcccctctttcactcttaaaaaataacaattcatagtttttcttcttcacttgaacacttgtgctagaaatctatcaaatttaatttttaaacaatggggctattttttatatcattctctatttctgttccattttccttgatttcagttctcacctgtggtttttctaactgtatttctatttgtttgtttgtttaacttgtttctcgtgagaaattgttcaaaagggaggggcatgaagccagtcttatcttcaactgtagcatggtggtcttctgtgttctattgcataaggatttcctcagagcacaagttctacttagggaagggtgcacacacaggggtattcccacctagccagattcaaatagtagtgctcacagcagatggctaagttctgtttacttttcttctgtaaattgtttgggtcaatatttctaatttagcctgataaattttacttagtagtattcataacagtatgaagcttttaagatatgcctctttcctttctaattattgctccatctcattgccaccatcttttcttcctctcttttacctttattcacttcctcctttcttgacttccctctgagagaacaagcactgcgagcttcctcaatacagtaaagccttgatttgtaaactcaaatatttgatgactttttgttactcataggtagtagagtctattacatttttgtgttcccaataccaatgataattctccccgtcgtggatgaatatatggcagcaattgaggaaacgtaactgcacatcctcagcgtttatttcacttgcaacaaagtatacatattacctcgctctctacagtttttagtcggggattctgctactccaagtccccagatttaggtcattactgagtgaaatttgaagctagatgtatatcacaattaagccagactttctttgtcaaacatgtcagattgtaagagtataagggagtgactggttggttattgaacagagtctgaggagactgaatagacaaagtgtacacaaactggagcagttagtgcttaattaggatgcagcattccagatagacttctaataatctcataggaacagttaaacttactcctcgtaattacacttctccttggcctattctgtttgaaatatattgggaattattgctacatatgtttggcaaggcagattttttagctgaatcaaactatacccaaggtcagcaagcatctccatcatagaaaagagagaactgatatcaggagatggcatggtgcgctcaagtagcctgtagatagtcaagacaggctttgatagaaggtcttttcaactgtgggtgtgcacagccacacctagatctggcctcccactccttctgcatgaccaagactccaacctggtcacttctcatgaatgcatatgcttataaagggaagttatggagagaattacagaaatgaataatttctaagtctcctgatatctgtgtagtttaacctaattattgtttatggtaattttcatgaattagaaaaattgtaacacttctaggactctgtcattctgtcaaaatacatgtaactatgtctttctcattgttaagattttagcatttgattgcatatgaaaatttgaaaatgtttcaaaatgagatcaatctttaaatattaaaaaatactcctgaaattcaagtacaggaacacaaattaatgcattgtatatgactagacacatgcaagttataatgcttcccatttttctctctgtttcccttcacagtgtgtttatatgactatacagataattttgggaggctctcctccccgaacttccccaacaattacccccataactggaactgcgtctacaggatcactgtgggactcaaccaacagattgcattgcatttcacggactttgccttggaggactattttgggccaaagtgtgtagattttgtagaaatcaggtgtgtgcttttatttcattataacctttattttgattaaaaatcttcaaagaaaagattaatgggaacatggaatgttttgtaaaattaccttatatgttcaacattataaaatttgtcattttaaacatgatatagaagaaaaacagaaattgtataaatttgatggttaagttttacttcttgatttaaattatgcttacatgcatgcatatgagtgtggttatgtgtgcacgtaagtggctgtggaggcaggaagagatgtttgatcctctaaagttacaggtggttgtgagctacccattgtgaatattgggaattgaactctgctctttcgtagagagcagtaagtaatcttatgtgctgagccatttttccaacctctgatagttacttcaagttcttgtattaggaacattttacaataattgtcagagtttacttaggcaaaggaagtgctactattccaaaggtgatgctcactgtttttgacatgcaagtttcatttctgttgctgtgataaaaatatcttatgaataagaaacttgggggaaatggggtttatgagcatacagtttcaggttacagtctgtcagagcaggtgagcaaagtgccaggcactaagtgagtcacatcataccctcagtcaagagcaaaaagaaataaattcatgcatgcttctagctagcttgcttcattgcttgtgcccagcagctctatttctctactctcatataggtcaggactccctgcctagggaatgatgtcacccacaatgggctgactcatcccatgttgattaacttaattaagacaacaccctcacagacagctggccactggccaacccagttgctccactgagactcctttcccaggtgatactgggttgtgtcaagctgatgatcaatacctactaccacagacaagtgccttcattgtttatgtaaaatcagtctttttggtctttgttgtccacctaatctaattgcatcactacaatcactgttacaacagcatccttaccttgtgtttgaataatagaagtctaggattgtggatttcagtgtgtgaagttttctttcactgaactttgaaagaatgtattataaaaattatatcactgacagtggtatattggtataaagatattttcttataccagtgcatcaagtaaaattaggctgattgctttggcaagcagctatagcaaatatttgacttgtttcaaacttgtaatctttcaacattttatgataaatattatcctttggtataaagtaagatacaaaattaacaaattacaattgacccatatcacactaaaccaacagttttattttggggaagtgagaagtttaagagtctcactctatagcctgaaatggacaagaattcactagatcatccaggctgtcctcaaactcagagaaatcctcctgactcagcctactgagtgctctgtgattatagctgtgaattttcacacccagcttaattttcttaatttatagcagctaaacacttggtttcactattcaatgagtcatcctttaaaaagatacctttagatttaaaattcccaacacttcttaggaaaataattatgtctacaatagttccaaacacaacaaatatgtcatactacatcttgatgatttcaaaatcagcaagaaatgtaaggtttttcactaaaaatattgatttatactgtcaataactatagtttctatattctgtatcctctgatctacttggctgatgtctttagaaagagaatctcaaatatatgctttactcagatggtataaagatgccagacaagccatagataatagttattgttcgccccccccccccaaggtcatgcaaatcgtagttagtaaagaactgagacctgagaacttaacattaagttttttaagtagtgacgtcagctgaggtgatgaactgctcctctgcatccccatgcttaaacatatgtgtttattgtacgctgccatcaaattgtaagtcagtccactttcatgtctctccctgtcacagagatggaggcttcgaaacgtcaccactcattgggatttactgcggctcagttttccctcccagaatcatctcccacagtaacaagctatggctaaggtttaagagtgacacggcactcacagcaaggggtttttcagcttactgggatgcgtcatcaacaggtaagtagcaaggatcttacattttcctggagaaaccaagctgatcgtgtttttcatttgtcatgctatgtagccacctgtcaatttttctagctatcctttatcattcatcattttttataatacgctccaacatcctgggtatctttggagtcctagcatcatacattttgaaggaagaggaaagttctacttccccgggagacttcaagctactcatcttgactagataaaggaaagcacatgaatgtgaagaagagctttagatgactctctgctttctgatgctttaaagaggagcacaggttgggtggtgggggtgagcccctatgatccagaaataggaagcagagacaggaggattccagttggaggcaagcctgggctacatagtgagtttttgtctctgaaagccactggcttgaggtgcatgcctcagtggtagagctcttgcttggcatgtgtgaggtccagggctccgaccccagcaccgaatacagaggacagtggagtgtcgatagggtgttttagccaaggtttatcttgcagaaagaaaaggccatgcttcccccactgtgttcccctgcaggctgtggaggcaatctcaccacccccacaggggtgctcacatcgcccaactacccgatgccctactaccacagctccgaatgctactggcggctggaagccagccgtggcagccctttcctgcttgaattccaagacttccacctggaacaccaccccaactgctctctggattacttggccgtatgtatactgtgtctccatgtcatctgttgctcctccttactcaatgcacaaaacacatttaaaaattattcttaagatttaaaaagcagtgagatttaagaggagcatttacataaaagatttaagtgaagtgaaatcttaaaagtaacatggtaaaaatgacagtcttctaagtatatgtacctagtgacttgagacataaagtatttaaggtaatgtaccgtaagctataaagatgtatttaacatatgctgaggagttatggactttatcctaactacaatgtccatgatttcagataggcattggaagctcacgatgctctggtttattgaggagaactagaggagatgttaaattcatctagctataggtttttatatagttcttgcatgtcaccaagttcttctagaatcctgtaaataaaatgggctgatgttttagactttggaataaaagaaccagcaacatttttcagttatggtctcaattttgtttattgaactttctttatgcatgcttagccttcagtctcagtcagactacaattgtagctcacatgctgactgtcaagcatctgtttattgaccaagttcagagatgcttatatggaattcaggactggctgtttttaaagcatatgcccattctgtcctcatcttttttactgaagagtcctttgcacttagtcttgactgtattatatgcaaaatgtcttattaaaggtgtttgatggcccgagtaccaactcccgtctgataaataaactatgtggggatacaccacctgctcccattcgttccagtaaagacattgtattgttgaagctgaggactgatgcaggtcaacaaggacgtggctttgagatcaactatcggcagagtaagtgcaaactccagcagtgaagagcctccagcagacgtccagacttacttagccaaactacccagataacattaactagtggtttgaggcgctggaactagacttaaattcttatgtgaaaactccaaagtcattgaaagggaaaaagcttgcatattaaatccaatcacatattagccaagcatctggtaaaacaagaaactcagggtagtttttactctgtggagacagctgtagttcagctcaggatcatgtgactctctaatggcatgtagattccagtcatgccacatgttacaatcctttaactagacattgtccagggaacagatacctgtcagcctaggttctgtcttctgcctgagttttattcagtagagaagcgttcatggagaacacatgtcctccactctagaacatcttctacagtaatgaaagatcttcctgatctttcttctccatctcctcttggcataccgagttcttcagaaattctcattatcctgtatacaaacagcttcttaaccctccatgaggagtgtttctgcttgagtgtatagtcattcttttcattttgttattgctttgcctctctttcccttggttattgtcaggttattaagccattcacctttgatttcccccctccaatagttttttatacataggatatcagtccttacaggtaaaatcagaggctgggaatatggatcagttagcagggtgtttgtctagcatgaagttctaagttccatctccagcacttcattcaactaagggtggtgacaagtgtacacaatcccagtatttgagaggtggaggcaggaggatccgaattcaaggtcatctttaattatataactagttagatactagcgggtgctacatgagttctttccaatcagcccccctccaaaaaatccttgctgtttgaaattagaaacttgcagacgatatcatttgtgagatgaaagaaccagctctgtgagtttggaacatattgcctctattgtcttgactggggatacacacatatatgtgtatgtatatgtatgtatatgatgtatatgtatattatatgatgtatatgtatatgtatacgtataattatatgatgtttatgtataaatatggcctaaagacttttaggagaacagttatcttcaggagttccaggttattgtgtctgcttcagcaaaggaagaatttgaagggccatgtgatgcatccccaaagtctctaagtggtgtcctgacagtgttgaataagaaattatctaggagccacattgcagaggcagctctttcaaagcaatgtttatgttcccattttcttttattgaaatagaaaatagtaaaagttatctaaacagtgagaaaggtgggtggtgcgtttgctttgttcaggtcattttgattgactggacctggtgtttaaccccaagattaggcataggtagtgctacttgtgtggcactgctgaaaactcatctttagaaaatgctattcataacattttaaaacttgatcgaaattgagggattgtatttcccttttcccactctgtgtcccctctgttcactcagaatgtcgtgatggtaacttgaggaataagggagcctttgttgaggatgcatgcaggcagctgtgcgttctgttattcatgtgacattcacaaaggacttatattctaagtggctgtattctaacattagaatattaatttctctaaaatatgaaaggtttgaaaacagaagcacaaaatgctcactacacatctctaattccagcagagagattagaataaaaccaagttatttgtccatatcaatatataggaatagcatgtctattttaatgtagctttttatgacacttcagtacataaagttaccgattactttacattattgtaactggagacttcttcagcataaaaatgacatgtcgtgtatacatatatatttattaatctagagtggaaagtggaaaaatctagatgtcttttaaaaaggaatttcacattgatcttagagacattatgatatagatatgagttcttaacactcttggcttttcctcccccccagcatgtgacaatgtggtaatagtgaataaaacctctggcatcttggagagcataaattacccaaatccctacgataaagaccaacgttgtaactggaccatccaagcaacaacaggcaacacggtgaactacacatttctggaatttgatgtggaaaattacgtaaactgctccacagattacttagaggtaagtgtcttgaagctcaataagcaattccatgttcctatccagaaaacaaaactatgctagacatccttcagactcttcaggttcaaatccctagctctgtccggtctgtctgaagtatatcaccatcactgttacgtgaatgggtgtgcttcatgtctctcattgcaccgtttcaatcttaacttaaaattattatcttgttagttacttttatgtctgatctctgtgcataagagaaaatgtttgaatatactcaatacttaattttctaaatattaagtattatttttatattttaaaattcaatttcatttgaaacaattttttcttttgtgaaacagatattttacatgtctatatgtctaacatgtaacatttattcaagtttctttatgcaatcctagtcaataaaagttgctttactattaaatgtggaatttaatagtgaagaaatgtagactatttgataatatgctattttagtcataggagatttcacttgagaaagttgttcttatgatttgcatatgcaacttttaggattatagattttcaaaattaggaagaaatttatttggtttagtttaatattaataatcactcatgtgaatattagtttttattttggtttatattctcatgtatcatatctaagttggcatgtatgtgacatctattttccataattaatgacattgccctttgagtcagctgacatatttcttttatttatctctgtgctggtaacatatgatactactgtgtccccatctgaagtgtagaggacctgctcggactacacaggtcattttttatggtcttccaccaactatgtaacaatggcttagtgtagcattttgaagattattagtaaggatgtagctaaaggtagagtccttgcctaggatgttcaaagtcccatacatgttcaatacatgttgcaaaaaatatgatttgtgttgtttggaaatctaccttgcaatgatttacagcatcaacacatgtcaactaaagccatatccccagggaaaacaacctcttgcacatttccttaactctctttcaccaattttcctaaaagattaatgtgatcacactgttgtctgagatcaccatgccttttctaagtactgaattggctttcaacacaaagaagacagaatatcttgtctttgagagacttttgcttgaagctaagaatataaggatattcttttgttttgggaaaagttctcgtgggttaacaacaataataaaaattatcaaaaactttagcaagtcacggtggtacagatctgtaatctcagggtttaggaggctggggcagtagtattgttagcctgaggccaacctgggaaataaaaagactctgtctcagtgaaaaaagagagcaatcaagcaaacataaaacatcccttcatttatatgtagaagcaacagcatgcagaaatagtattcgcacatcaggaagtgataggtatttgttgccctaagaaactatgatgtgttacacattagatttacaagcataaatttggaatgctctttgttattgctttcatggtttggaaatagagtatcctcttgtagatcaggttagcttcaaacttgctatgtagctgacgttggccttgagaacatgtttttgttgcctccacctcccaaatattggaataataggtgtacatcaccatggctggcttgtcaatggttctagggtcctcttcctctcgagtcaaaagcatgcaggagctcaggaactgcctttcctgtttatataactgaattatacttttcttcacagaggagacttgactcatggtttaaatagcaagttttaccaattagggctctcaacatctcctggactcctgacttctcaaagtaccagctatctgctattaactttggccaggccctcactttccactgagactctgcacaagtctgagaatctgagggtaaaaagtcatagccatatttcagctgtagtctcataatcgctattaattaatgagaaagaactgcatttaatgcaaatctttctgtaaattcctacactttcggtacagtcctacctctttgagcacaaaccacaacctgggacagatgccaagcgttggatacataaaaaactccatgctaagtggataccatggttgggattggagatagtaccgggaggagagcgcataagaagaggaagggactggactggtctttacttgggagaaagaatggggaggaagtgagaggaaacatttccaggaactacatcccacttttttggattggcccgagagtgcaatgctcccaaaaatctcttcaagtcattttgagaggtgtttaaaaactcaattaagaatacttcttccaacggctacaaaacagctcatcagaggccccttgcgatggcgtgcctgtcgtgttccaggcatggcacttgtcttgtgcaatactgatggtgaacgcgtccaagcacagaatgagaaccagaagttcagaaaagacttccaaagaatgacacaattgccagagggaagagatttttttccattgctataagccaagaggcaagagcagagcagagacgcagaggctggtctatgatggaaaatttcaaaacgcaaccatttaaggagaaaaaaaaaaccctgcaggcataaaatttctagcttccattattttaataacttctagttaaatgctgtttttctttcccatttccttcaagtgccctaggcaatttcccaatgagtgacaattactggagccagaaattaattattttgaattaataaaactgaaactataaaaagactggattaggtctatcccacacctcactgggaaacaaacctaccctttaatgttttatcctctggcccaaactaaacccctcaggcttagaactagtgtctcagagcgagtgctggttgcttgtttagggaagctggacattgcctgtgcagctttgtgaagtcagcgtcaaggatttgttctgtttcctaacttgatctcactcttgtcttcatttttgtcctaagtttccacttagaggacatttctactgggtgactgaggatacaggcagaagcaactcttatgtatgaaccctgtggcaggtgttaggtcaacaggagcatatgagtgagaggaagaagccagagaaaggggttgcctcagtgaaacaaagagagggttatggaaggtgaaagagattgccatcagaggggtcaagagagggaggtgaggatggtgaaaattcattggaagataagtgtgaccaaggagggccattgctggggaatagcaggaggcaaatgggtgtggggagacatactggggagaaagcaaagttccactgagttctttgcctcaaaccagtatgtgaggccatggcctctttcctctaaccctcccttttatttccttacctggtgctcatgcagctttcatgggggtgtccttctaatatgtccttttgcatggcagactgtcctaaatgtgaccccaaaagtggatagcacctcccattaaactggacagagctgacttgtatgagagtatattatgttcctggtattatagatagacattatatgatgttccaatcaagttatagcaagacctataatctccaagttgcttcttaggtgagttgttatagctaataagctctgtggcttataaaaatcttattcaattttgatcgtgtagtttttaaaaagtcacaaagggcattattcctagtaagttatattgaaatttgtctggtaatttcttcataccatgttccccctaagtgcatatccattactctttagaatgttattcattatctattatgaatggacatacaacttcttcaaaaataattgattaaaaaaatcacacaggatggcctctgttttaaatattctcacacagtggattttgtttaaatggatctatagttgaatatttagaaaatattgctatttaaatatctaggaaatattaatatagctaatatctactaagcatatattatagctaggtaacacaggaaaacattgtcctcattttacaggtgagaaaagttttgtagatgtggatttctcataggtaagcataatggtactgagagtcaggtgggctgaacactaggcactgtgccttgggccttcacacatcatagatggcatctcacaactttctgccactttcacagaaatcatgagggaatgctcatgggcccctcacatctatgcttatgacattcttgccaagaggcacaggaatgttttaccatggtctcctcatggaaatagtcttctactgtaatcacagtttcttgtatatcctataattccttttagggtctaatttagaattttagctgaaattcatgtcactctcgcctgtttatgaaatgtcaggacagaacttttctatattttgccaattgaaaagacattggtgtgggattgctgctgtgagaggcgtgggccatacaggagaggctgagaacccaggaaaggcccaggagtgaactctgccctttctcttcttgtgaagatcggttgcttctccatggctgtttccgtgtagtcttttctccagaagctccttagagtttctatgcccttgtcgtcacgaacactgaagccatggctgtgcataggacactaacctcaagcacttaatatcaggggttcaatgttttaaaagaagcagcaaaggtgagggaatagcttacttgtgcagggcatgccagtcctcatatatggtgtctgtaagagtggctaaaactcccagcagggtcacagtttcactgtcattctaaaatattttacaacaaccaaactgtcaccaagatgacatgtttttgtttttgtttttttctgtgtgagtagttattgcatgatagagttcactcatttctgaaaagattcaattcaagtaactggcctatctcctgaatggaaattctatgtctctttctccagtttcagaatcaatttctcatcttccttctctgtgtcaaattcttctttagctgaaggtatccaccaccaacttgaaccaacttggtcctcttcttttttctttttgttttgttttgattttgatttttcaatacagggtttctctgtatagtcctggctgtcctggaactcactttgtagaccaggctggcctcgaactcagaaatccacctgcctctgcctcccgaatgatgggattaaaggtttgcgccaccacacccggccagggtcctcttcttaagtcaaccatagctttaaaaattagaaaccttttcctatttacattaaacccaaagtttagctgatttgcacacacactagtaggatagtcagagagccccacaggttgcttccttccttcagaagtttcctccttggtacccttccacatccatgccatttctgattcatagcatgctttactttttaataatctatcttttgtctggaagtttcttttccttttctttttccctccttcagatctttgtttcttgacctatattgagatatatagtcttttgtgtcactttgaaatctgtcacccaaatcataggttgatgactggcatgctcagttgtctcagtccttatagtcagtgtaccacttgacccaatcatttggtcacctccacaacaactgctccttttacagcattacaatgaatccacaatagcacttctcatttctgagaaataaccatggcaataattcaacaaaatctatggttttgtgcaaacatgacatctaacaggggctcacatggttgattggccttccaagtgccatttctgcagattatttgaatgtctccgtgtggtgtcagcatttttcctttgtaaagactgcagtctaggacttagagttggcttggtggttaagaacacttgtggcactagcatgaaggctagagttgttcagatccgataggatacctgtaaatctatggaagaactatatggaagaaagctatggaagatgaaaaacttgctggggcagattatggggttttcttacttccaggttagctaagaaaaatgtgaacctcaggttcaaggagagactctagcaaaaaaaaaaaaaaaaaaaaaaaaaaaaaaaaaaaaagcagagaatgataaaggacaccagatattctctttttaacatttcatgtatgcacagagtacccacacaagtgacatacacacacacacacacacacacacaaacagatatagatagatgattgaactttcaaaaattgtctctaatgatttagaactataacatttaaaactggctattaaatctagctgcagtccaaaatccactagggatctcattagatagagctgactttagtcattactaatggtaatatcttcatttcaaaactctattggtaagttacaagtgttctggtaggtatcttagtgtgtgcctttgtgtacaataaatatttctctttaaaatgaatcttattatcttagtcagggtttctattcctgcacaaaacattatgaccaagaagcaagttgaggaggaaagggtttattcagcttacacttccacattgcttttcatcaccaaaggaagttaggacaggacctcacacagggttggaagttggagacagagtagatgcaaaagccatggaggagtgctccttactggcttgctccccctggcttgctcagcttgcttttttatataatccaagactactaacccagggatggcaccatccacagtggaccctccctccttgagaaaatgccttatagctggatctcatggaagcatttcttctgtgataactccaacttgtgtcaagttgacacacaaaaccaggtagtacacttactttcccatagctacaaggaggagatattctcctgccaacagtttaggagggcccaaattagcattaaaatacaagcagcattaggccaaacccactacaggaatgggtccacccacaatgagctggaccctctcccttcactaaatgaagaaaatacctaataaaaatagatagatagatagatagatagatagatagatagatagatagatagatagatagataaacgaaaatgccttatagccggatcttatggagacattttctcaattgaggttttctccttgcagatgactctagtttgagtcaagtctacattaaactagccagcactctcttccatcctatcctttcctcccttcctgtccttttcccctttcaatttaaggaagtttcaaattcttcctgattatgtcagtgctttctgtcaaatacatttccttccagtgtatacaatctatttcatctcttgccaaatccttactgatgtcatcctactcaccagatgtttatgtcattatatatttcactctcacgtcctctttttaattgcaaaacaaccactatgctacagcgattttcaattacaaaataatgcatttcaaataagaaagggattaacaagcccatcaccaatgtccctgaattctccattttggcaccatactccctgtctgtgtcctaagatatttcccatcccacaactgtggatcacatggtattttaatcacccacagtgctatttgggttttgtgtcaaactcataccacttgctgatgcttcatgcaaattcattgctcagtcacatcagagtcataacacgtattcttagctttccatacagtgattcatgaacacagacaacagggaagtctgttcagggtaaccacattgctatatgccacagaaacaagagctttgagttgtactgaatgagagaaatgctgagataaacacagcttaaggggctagttatttgctttttaaagctatcactagcctacaattcaccatccagacagtagaagatgttttagactcctaaactgtagaaattaactgtatatcattagtttttcatgtcatactagatgaaacagatgctaacgtatcacacaataaagagtctatcgtaggctgcgttatctgtttgagagggctattgatgggtgctctgaaggcatcagacagggaagcaatcaagcttttctgatgaccagagaacacaaacccaaggaagaaggatccccagacatcagagaggttgaggattgacaagagaaagctgactctgcacacctgaagatggattacaaggggcctctagggtatcaataagaaagtcatgaatttcagtgttccttttcagaactgtaagtctctcaagggccagataaaagaaatagcatgatcaaatagatattttcatagtgtaatatttcccttattgaacatgtgtgtgctttttgttttgttttattttggtttgttttggttgagtttttttttttttttttttgaggggggggcagttgttgagccagggttggccgtgaactcctaattcttttgtgttagcctggtgagtgtaatgactgcaggcaagtaccaccatgctgttttcagatctgtatattttaaaaatgattgtggctactcaaataatatggagatccattattgggcttgaggtggaaagcggaggagatggggcaaagccccatattgctgtggagaaataatgttcaaactgaggacttttaagaacattctagaattgctttcttgactcttcttccatccttgcagagagaacttagcattcattcttggacatttgaggaagatgtttttcacccttagtgcagtatccctctcttgaacatgccatctgtgttcctccagctaaccagcagctcagcccagtggcatctgtctcctcccccagcagagagctagaatcctcagcagccccagagctctctgtgggtggcctttgacttccacgtccccttagtccacagatgcagctctgcttaggattttgtcttctctttctctcttggaatctgtttaaagacagaagtttctatccagttaaagtttgttttttcctaacctctccaaaaagggaaatgaaaaaacatgtttgtatttgcacataactgctggtcacatgtccatacaactgcttccatgcagggttcccgaacaatctctcaagatccagaaattctgttgtcagtctaatagtagtcttctttagttctccttgaaaaatatcattggaaatgaaatttcttacttgtgcagttgaggagcccattattagaatcaaatctgttcaaggagggtttaatcaaatcagttgagcctgctgacagctgtggggtggtaagaataaagcttcatgttcctcaaatattccctggctagaagtgacccttaagcatcgggctctattgcagacctgctcagtcctttctatgctgctcagtagagcatgacggtttagaaagaagattctagagccagtaagcctgggtttaaatctaagcttgaataaccatggatgggttgttcagtctctgggtgtcatttccctcagtaaaatggaacaatcaaagtaaatgagctaatacacacaaagaatgagaacagggcctagcacacagcaaacaatgctaactgctgttcgcggtactaatcgaagcagagctcctgagccagccatagggattcatagtgcatccatcctgcaggcggagggaattagtggcccctcgtttagaattcttccttttctttttgctgatgactgcagccagcttcctcgatgcatcttggcaccttgcacaaagtataaatgagaaatgacaacacccatattctagtctactgatttaactgaagctctttgaggaaacagaatggagaggttccattgacacattgaaggtttggaaactgttagtaacggccttaaaaactgctccgtgcttctctataatcctttaacaaagaatgagtatatttgctacaatttaacattttttggcttttagaaagaaaattggggtgaagaaaacaatcagttttctttgcatcattgatgcatttcacaattctgcattaactacacttgcactcacctcagtttgtagagacttcattgcagagttgctaggcattttaacccccagtaatgcccagcataggacacatgcccataaacagtgcattattattctagcatgaatagaatctcccagactaaagagaggcccattggacacgcaaactgtatatgctccagtacaggggaacgccagggccaaaaatatgggaatgggtgggtagggaagtggggggggggagggtatgggggacttttgggatagcattggaaatgtaattgaggaaaatatgtaataaaaaatattaaaaaaaaaagaatctcccagactatggttcagcccctagccttttgcactgtcaaaagctgtatttgggacctggggagttgtttcagttactaagtatttgtcacacaagcaagagcacctgcgttcagactcctgtgtaaaaagctgggtgtgatagtacacctcacatctctgtaaccccagcactgggataggcatgtggaaacaggaggatccctggatctggccagccaacttagtcaaattgggaagaaactttgtcttaaacagagtagagagcaattgaagacatccagtgttgatctttggcctgcacacagcagcattcacatgtgcttagacccacgtgctcaaaaatacacccttcacacataaatacttatgtgtccaccccaaaagccatagtctacaaacattttcccctttatgataacagagttgtacacagagtgtccccatgtgtgaacagcacagctccttccttctgcctctcagccttcttccaaaagccacagagcttctctgtctgaagcctggtaattaaaagctcccttcctggttagaacaaagcagagaagcagaagaggttttgtgtgtgtgagccacagtgggtttgactctttgatcagggcgcgcctccttgctcatttcctgagcagatgagtcatgtttcctggaacagtcctttagaggaagtgggcttccacaacgttagctgtctgctaatagccctgcttacagtagagcacctgccactcacaagtgagtttaagtgcattctataggccagacatttagttttgtctccataccagctgggagaatatagctttctactaggataatccacattcagaattttgaaaagtatagcaatgaagctgatctctcttacgtcattaagcagtccaagatgcatcttagacaagatgttgactccaaaattgtctgggtaaaatgtgatttttttgttttgttttgtttttccagacagggtttctctgtgtagccctggctgtgttctggaactcactctgtagaccatgctggccttgaactcagaaatcctcctgtctctgcctcctaagtgctgggattaaaggtgtgtgccaccacttcccggcgattttttttaaattataaaaatatatgaattctttattttttaggcgatcaaaattcttttcagacagagagtggtggtacacacacacacacacacacacacacacacacacacacatcacagcactttagaggttgaggcaggaggatccatttacaatcagactggctacctaagacccctgtctttgggagaagaaaagaaaatcgttgcccttttctgaccatcctcacgatgaagaattttcaactgactagtttgctatataaaatgatgcagagctgcagccttcaaacaaccagcctttggttcaaaagagctctggtctctgctcctcatagcctctcgaacttgaagcataggattcagatgaataagaacaaaacctaccacaatttcccaaactaccgttaagccacttaaaaatccctttacatgcacaaagtttgacattatttcccacaactttccacctctcttcctcccatacttaagcccaaagcagaaaagtccagaggcatctactatcaatgcttgtgagtacactgcacagggaggaccatgggtgcaggcacactgcaaagagaggaccatgggtacaggcacactgcacagggaggaccatgggtacaggcacactgcaaagggaggaccatgggtgcatgcagactgcacagggaggatcatgcatacaggcacactgcactggtaggaaatgctggtcacaaggttaagttttaaatatcataaatcttagttaggaattctggtttaactttttaaatggggaagatttccaattgcagcattagagacattatatacccacatgcatacacacatgcatgcatacatacatgcatacatacatacatgcatacatacaaacatacatatattagcttttaaagttggcttgcagaataatcactgcattttcatatctatttgatctatattgggggccactgttcacagctcccttctgcttcctttttatacattaaaacatgtgaaaacactttaattttagttcttacttagcaggcttactctttcttctggcaacctggaagaagaggcaggcaaaagcactctaggtctctatggctcaaggttccataattttaatttgttctatgaactaagcttttccatctgcagcagatgctcaggccattggaaggcacaataatatatgtttaaagcatttagtgttttactatgacaggacaattgaaggctatagcctatggaactaaccatatgtatccacaggagagtgtgtttggctctcaaagtctttccctcctccctggggagggacaagttattcactgctccatcaatgatcataaaattcaatatttatagaagtccatggacttctaaagacttcattttaataaagaattagaataattaataatagttaccatgaaaaaggatatgctcaggattaaatggcttgaaaataacgctggaacagattactttctgtaacaacattttaagacaaatgttgatgtttgattctaaacacagaaaagagatatggaaatagcagaacattttagtgggccagctgagtgactggaaacctagaggagtttgtaattctaatatggcaaacattactaagacatatttatgttatgatgtgaatagttctacagagataatgtatttaaaatagacttaactaatcaaaaaagaacacatagtcactgcaggagattgagaaaacatagaaaagcctagaggtaacaaaacaaaaaaaaagttaagttccactgcttccaataatatttagtggtattcattgcctgttctcctttttatgcttattttattttaatattcacagattattccatgcattctaccctgtaatgacatttttctatggagcgtatctattatatgtgttactgtccaagttcacatgtggttgccacattgcagctgctgtgagacagttagcgccctttctagataaacatctttgtaggtaaatgttagcttgcatgcatgtttatgcattgattaaaaaaataaataaaacaaagcacaacaaaaaataatctaaatcagcctttgtgccttctgatataagtgatccatagaaagcagtacttaaaaccatacaggcaacaagagcagactgagagcagccagtccacagagaggccactaagccatctggattggagataaacctctaattcaaagtggtacaaaataactcagggtaactcagaatgtggtcatctgctggtttgccactcacatgcaaaccctggcattatgagtaaccgttgactttagatgggcagttcacatgccctgctccaccctgatagcacgtggcattgtggcttttcctgtagtgaggacgtgtgtgggagtccccgatgccagtgtgccaggagtgagtggctgcatgtttagtggggagaggcaccaaggccccacagagccatggtggagcactgtcgcatgtgtatcacacattctcaaccttcagcaatatttggctcctttactttctgcagttcaacaacagattctgcaagccctgggctttttcctgttcctaatgacaactgtgtatcagtattctactctacaattctaatttggcagaattgcagaaacattccaaaacctttaaattttaaagtgacctataaaggtcacgcttaccaagatagtgtatgtaaaacttaacaacatccataaggattgcttttgtgcttggggtgaactcagaggtggtgtaccttcccagcctacacaataccatggcttcatctacagccctggaaagataatgagtcagtgccataggcattctgcagttgtggttttcgggggaggaataaacaggtgtttcaagaattcagcacctcctgccctcttgagttccagggcataagcagcaggagccacagcatggaaggacagtgagaagcaaggccactaaactaaggaaaagcatatccccttctgctcatccaggcccttctcatctcatcatgctagcctcagcaccttctggtgtcctctctcttatgctgtcctctgtcatgatggaccacacttcttcacctcccacacatagacttaatttccctcccctcactaagggtgatttgcatctggctctcacccagaatgtgaggaatggctgcagtcacaactcaaaccaaggttaccacagcaacgggatgcaagtaagcaagcaagggcactccatctccaggcttgagtcacttcttccctgcctgctcaaccagtgatcattctgtaaagagttaaacatgagtcagactcagctgtctagactcatatttcattgcacaaagctacttctgggtggtttctttagtgaaaaaaaaaaaaagtagtgttccctttatatcagaccaaaagttaaaagaacttttcaaacacgctctaccttgtctccatgtagttttctcatttgccacaaggctgtaagtgccaagtgataccaaaattacgtattcataaagagttcagattcaaaaagttaagtaacttctacaagactgtgtgctaagcccaactctacccacacaagaaatgccttgacaagaaaatgacttggttgctcttccatcattgacacttgacttcaaagagcccatccaagaactcctgcccagggtcttaatcagcttcattttattgactacagtttcactttttaataaagataggggaatctttgctgtaccttaagggtttaagttttacttatttatttatttatttatttatttatttatttatttatttatttatttatttattatatgtaagtacactgtagctgtcttcagacacaccagaagagggcgtcaaatcttgttatggatggttgtgagccaccatgtggttgctgggatttgaactccggacctttggaagagcagtcgggtcctcttacccattgagccatctcaccagcccaggtttaagttaagttatttcagtcacataaaaaaaaaaagagttgaagtagtattccttggaagtttccaagcattctatatataataggatgtaatgaaaaattcctgtgtttaatggcatcatacaagaaaggcttaatttgccttccatgtcttatgactgaccttctgtgattgagaaaatgaggtttacttctagacatgcttcaagaacagaaaaacaatactttggattgtggttgtagctcagtggtgcctacagtaggtgcctagcagtggtaagattctaggtttgaactccagaatcaaaaaagaaaaaattgaaaagggtttagtaaagggacaacctgctggggcccaagtcagaaaacatgttacacaaggctctgctcactaagactctgatttccagtgatgcaaaggagcccacctagctttttggttggttaattgtttttttttttttcttttttctttttttttttttaataaagacagggtgtctcgacatagccctggctgtcctggaactcaggctaatctcagactcatagagatccacctacctctgcctcctgagtgctaggattaaaggtgtgttccacggtgtctaaatgccagcatactttaatctccagggctagagagatggtttagcaagtgaaagcacttgtgatgcaagactgggagtttgtgtttgattcctagatactgtggtaaaggggagaattaattcttgaacattatcctctgacttctagatatgcacgtatacatacaggaccccataacacatatattaaccattaacacatataaacatacaatggtacaaattaaaaacaaacaaaacaaaaccaaacctatctcactgggccagtgagaaggctcagcagataaaaagcacttgctgtgcatacctggtgagctgagttcaatccccagaacccacatggtagaaagagaaaacacattgctgggaattgttttctgacttccacacacatgcataaccttgcataccttgcatacctacacaaatatcataatcaaacacactaagaataacagacaaacagaactgttaatatcacaataattgggccttctctgtcagttgctaacatactgcatgtgtctttaattttatatcatctgcttttggggggcccttaatattgagaggggcctatgaattgtttcatattgtaattgaaatctgaagttactatggtttctgtgtttgtaccagattgtcaaacacacaggatgtaaccaagcagcccagcattttaggaagtgtagcctggacaataaactccttccctgtgtgtcctgataagggctgagatgtttttgttagggtgagggtgagggacacttgaattacaaacatcacacatgaattgtgttcctaagagtcaaactgactagactgaacacaaaaggccttatgatacacagtatcacatttgaaatgatggccaacatggcaaagtgagaatcatttcaagtattttatttttaaaaagacctgcagtgacacaaactagaattcatattcaaggtgataaaatctcatctgtaggttcttgtttctttaagagcgttcagaacttctcgatggttctgtggagtagatctcaggcttgctgaaagcagaagaaatcatagttttaccagattcaaaccagcaagctttctggtcatgcctatgagtcacagctggaatgtcctgtggttaacattctgtcttgaaaacagaatcaagaccagcaagccactgctggtttctatggtgactggtaagccaccgctggtttctatggtgactgttactttttgcatggtgagtttactcgggaatgaactgtggaggtgcattagccatccgtgtgagaagttaaacaaacaaaaaatgtgatttaattaaatataaatgttaaaagcacataaaactgaaggagctgggtggatggtcctccccctctctagtagaagtattggtgtgaagtaattaattcgttaatttatttcacattgtatttaagtattttcaaatatgtctacttggtgtttattgtaatgcatcattccattctttccaaaggataacaacatttagttatcatttatcagtgtttccacaaacccatcttccttgtctatctacctggcccagtcccacacacaatgtaccaccactggcttctggcatttaggggctcttctttagtgtagaagatcccattagaaggaagaaaatataccatctacatcatttaaaattccacagctcttaaccttgttgagctggagagaaaaagaatgcgctataatgtattataatatataatgacctgtgtagaatcaactatggtccccagctccctgctacccactgcgtacgacaatccaccaggtagagggtgcttatggccacaaaaatgtttaccttaagttttgcaagttaaagaccaagtaatttcagctttggtcactaaatcacaacccaaagttagaatctcttgggtttaaagactgtaggctgaaagacttgcttattaagtcagtatgtggtgacagtatatttatttttgtatttagtttcaaagtagacttcacgcaataaaattgatgaaaaccttgaaacagagataaacactctgctgttagacagtgattcaggagcattcctagtacagcctgggagcactcacagcacattctgggagtacttacggcatagcctggcttcattttgcacctacctccagcttaagaaggtgatagaacccaagactcaagggaagggctttggctcttgtctcttctgattttcttattctcttccttccttccttccttccttccgtccttccttccttccttccttccttccgtccttccttccttccttccgtcctcctccctctccctctctctctccctctatctctctctctttctttctttcctcttcttttttcattctattgccttttcctggcttctgtcagcacatagtgttatcagactttttattactgcaacaaaacaccatgttcaaaagcaactcaagatggaaagggccattttaagtctacagttccacatcacagtccatcattgaggaaaatcaagggtggaaccgggaggcaggaacaggaagtcacaaaggaatgttgcttattggcttgctttccatggctttcttgtcctgcttcctaatagtacccaggaccactggcctaggtgttgcactgcccactgtgagctggccccttcccacatcactcattaatgaagataatgctccatgggtttacccagaagccaatctggtaagggcagttttagatttagaatccatcttcccaattgtctccaggttgtgtgaagttgaggttaaactagacagtgcatgtagtatgctaggaacctgacaagaaatacaggtagttaagcaagagtgtttacaacacaaatacaggtagttaagcaagagtgtttacaacacaaaaccaagagaggtaaggtaataaacctgggaacgaactctatcatgatccatttatttaaaaatcatggatttagtaccaaacagtgaacagcttattgaactctgcttctcattttaagcctctgatgatcaccccacagtaggatgaacaactgcttgagaatttgatgaggcaggtcatcattcagaaatctgagatttattatgagcttgaacaagacaacaactaggttcccacattacaggatgaccacaaagtgattcaaaccctttactgcaggaaattattagactgatacttacagttgtatgattcaaattcttatctaactatacaaaagtagtaaaacagattaagtctttaaagaatatcacattcgtggaagataccaaaatgtccattcactggatagctactggaattcttcccttagagtgttctgcttttaacagagaagaacaggaaatccaggagtggcctgtgcccttaggaaagtcgaagtcataggggtaagagaatgttgtgtgaatcaccaagaagggaggcgatgtggcagactgcctagcagcacaactgaagagctaagaattcactaggcatggtggctcaaccctccagaccgagcatatgagaagctgaggcaggtaaattgctacaaggttaagccacactacattgtgatttttcaagcctgcttaggctacagagtgagaccctgtcccaaaacaaaccaaagtaaagcccaaagggacatagtggcttattcaaaggttaaaaacctcacatctaatcattataattaggaaagagtccacagacgtactttgcaaaatctggttataagatttttatagctgagtttaaagcacattatatcacattttagtacataaaagaacttaccagtttgaaaatcactgactccatatgatgcatgtattcacagatgtatagaatgtacagccactaaacagtgagcaaaaaagccaagggtggtagaatgatgggcagcttggtgagcacaggagaggggaaaagccacacgggggcaaaatagcctgagaagaagaagaacagtcagaggctaggcctttaatcccagcaaaagaacagtcagaagctaggccttcaatcccagcagttgggagttagagacaggcagatctctgagtgaaaagccagcctggtctacagaatgagttccaggacagccaaggctacatggagagattctcaaacataataagatgaaacaaacaaaacaaaacaaaaccaaagacaaccacaagaaaaaacaatagtccaggaagcctatgtgcatattttccaatacttcccgttttgttattgcaggcagctcattctaaagtaactgggatcaagtgatataggtagactgcagggggtttcagaggtaatctgatggcccaccacatgaggaggccacattttgggtcatccttttttcctacgtgaaaagagaaagattcttttccagaatagcaaacaaacaaatgtacacacacaaacaaaaaatatgtgtcgtgctttacttaggggaatttctctttaatttcagctctatgatggaccacaacggataggacgctactgtggagaaaatatccccccaccaggagctacaacaggttccaaacttattgtagtgttccatacagatggggttgactctggagagaaaggatttaagatgcactggttcatccatggtaagccactcattgatctccgttgtattaataattgttatttggccaaaaagtatttctttaccaactccttccttggaaacagtggcatcaacaaataatgaaagcaaattagtaacctagagctaggctatagataacttactgagatgtctgtggaattccaggagataaattttgctggagttctgagaaaaaacaaagttaaagtagaagagatttgagtaactgcttgagcaggtggagtgataatctgccttagagtagacacattacatacatggtggtgacatgtgagagtcccaggtgccatagaacagaaagggacataaggctcaccttgacatttgtcagagaaggaatgaccaggacaatataaagaatgggagtcagaaaggtcaaagaggaaaaaaaggactggggtgagagaaatagtggaaacagatcatttgaactggatgcaagaattgaggattgtgtcttgtatctgctaaacagactagggacatactgaagactatctacaaaccactgtttaaggcacagatagaaataattactttcctaaaactcattattaattagagtcatgagacttcaaaattcatctcctgagggtcagtctataggttgacggaacctgcacaatggtttttaaaatgcagctgccagtaacagcaggagcacaggaacttttcagaaatgcgaattcttagcccctaccctacatccacagtagttctcaaccagtgagacatggtgttaggactcatggtgaatgtcagtaaattgaggagagatagagttgcactggtataccagaaatctcacagatacctaaactgcaaccctcctgttaaaaatcagtggtaaaggctggtgagatgtctcagttggtaaagtgcttgccttacaaccatgagaatctagttaaatcactgaacccaagccacacccagtaatatgctcctataaagccagcattgaaaagatgggaggtgaggccgaccagaaccttggtgctcgctgaccagctaggctatctgatttgtcagagttctagatcaacgagaaactttgccttaaacaagaggtgggaaatccctaaggaccaatactcaagattgctctcaaagccctacctacagatgcacagtgcatatatgtcccaggcatgagcatgcacatgtaaatgcacacaaaaacagagaaacacagagagaatgcagtgtgagttgcgtgtgtgtgtgtgtgtgtgtgtgtgtgtgcgtgtgtgtgtgtgtgtacatgagaggggagagagagggaagaggggagagaggaaagaggagagaggagagatgagggggagagaggagaggggagagagagacagagagaacatgaatcagaggtacataagcaagcacatttgaaacttgagatttattggcattacaaccctcccatgtaaatctcagaactgccaaatagaattgtcaattgtagatcctttatttatcaagatgaaggcttttctatttgtgatacagttttatataccaacaaacccactataacttgaaaatatctagaatcatgtcatgtgtctaacttaacaaatatcattactagcctaacctactttaaacattctctaaaacacctagataacctacaattggtaaactcattgaacataaggccaatttataaagtagcaaaaagtatttcatatgaaattaaaaaattacaaatatgttttctcttgattgcttatcacattcaatcatctgaaggtaagaagtgtctttctctgtaagaacgttagatgctcttctgatatgatttttttgttaaaatctaaatgtagacttctccatatttaagtactagtggcaatacactgggctactggtaacttgaaatacatatgatgattctcaatagtaaatgagacatgtggtcaatcttgcagagttcctggatgttcttcttcatcacgtgagttttacacttacagtggttactttattaattgacctaattaaaggatttagttgatttctctccccagtatattatgtttccagtgttctgttgttcaacaatattttgattctaagtaatctagagatggtctgaaaagacagagagcaaacaggaaaaatttgaaaaatagcccagactatcaatgcctgggaatactcctgagaacagtgtttgtcagttgtttatattcacagaacagctaaggttctccttatcttgtatttagttttgcaatgcctagaactcaaaaccaggaccccacacatgctaggcaagtactctaatgatgagttatatccttagccctcactggcaaatcttgtaaatatggagtagtgaggcacacccactggaatttctaagactatctctggacgataaggttgctattacacgtaactcagttttaggagcaaggcaaaatggcattgcatttggtcaagtaaaatggtagaaagacagaattctgagattccagagaatcctgctaaggagttcaaatcacatatgatcctaagtaagtttaaatggcaccagatggcagccaggttcctgaaggaaacaacgttctgcttcaaagatttaaagggcctaagcatgggaagtgtcttgggccaaaggcctcagaatgtggtcctcagtcctaggtatacataggaattgtctaggagtttaagcacaagagaaccctgagagatagaattctattggtcatgtttggccattgccactttaggtcccgtcctaagcgatgcagcctgcagtcagggtggaagaatgaagagatgctggcggtacttttgctagctgatctctttattcaagaagctgctcaccctcccctccaggctgttccagccgttctggctagagcttgcttgatgggatggtcatcactggcgacactcaacttactggataactaactgggttcttctagccaacatgccaaaccctctgttgaaagctctaaggttttgttgagccaaaatttttctttcacttatttttggaatatgtcttctttcaagagagtcaaagacaccctctgtctattctcttttcctgtttaccattgcaaaattttcccccgtttgctgaaaatttgctaagttcagagccagagttatgtaacaatattttactaattaggacaaaacttaaaaaacaattttgactctgtactgtccactgtatgtagatgctatttgacaataatcttctggaaggagatcatgggcagtaaaatcaatacaaaatgaactgctatggcatgtcatcatcatgctgcattagtacatcttatgttctatatctgacctatgtaacttgggatgacttgagaagaggaggagttaacagagtaaacatcaggcagaaagtcttcactgagaatggtaccttgattagttattagaggaaaactcaagactaagctgtcattcttctgtttattaaagctataggtttaatgtttctatactagataccatgctatgtatgactagggatactgaaatggcttagttcccacatccactgcaataaagggaaggcaatcagcatgcaaataaatatgcacaatcaaatcttattagggacgagggaacacacagaaagagattggataagattggagcaggcagggaagtcgtctatgaaattgcaacctctgaactaacacctgaaaattaagtaagtgctatttggccaaataggagaagagaaaggaaagaccccatgatacaaagaatcggggagcaagagattcaagaccaaaagctaaatttctagaggaaactagtaagtccagcagcaactaccacaactggcttcatgagacacaaactcaattcatagtggtcacagtgtcttcctctctgcaagtcctttatacttcatgcaaacaggtctggggtaggatgcccaaggatggagaagcacgataaattgtgggtcttaaaatacaggatgcaatacaaaatacacactaaacagagttatgactcactaaacaacagggtcatgtttcaagcaatgccttgttgttagcccatttcatcattgtgagcataacggagaattcccacacgtactaagattgctacaaggtcacctgctaatctgtggggctgcccaggtttgtggtgcccatccatgactgagcttcattctgcagcatgtgactctcagtctccctatgcagaactgatattgaagccctctcccctctggctcctttccacatgatgctataagaactcagcaaacgcttgctagcagagcctggacttgacaatgatgtcatatcctgagcactgtggctcaggagcccctacacacttcattcattttgctcagtgataaataaatccgtttacccagtgtgcctttttgtcaacagcacagatcttctctttacttggagaaaatggatctacaagtgagctttctccgtgggtccattttgtagatgcaaaataaagcccacactgcagtgcctttatgcagatcttcaaagagaatcccaccctggaaataaggaaatggccacagtcgctctgcccagctaatcagttcacaggattcagcattgacatgacagtattgttcagaagctgaattctatcctgggagccttggtctgggctgctgaagggtatatagaacttctcataaattgtgtgaataggagcctcccagccagctgcacacacccctcctccctttccctccggctccttccagcctcctctcacttggcagtggactatagcatgcaaacaaggtcaaggagctttgtgggcagagagtgacatttgcaaaggcagcgggcacttcagctagggacccagcaggggaagagctaaatggcatgtgatcaggaggtgatgtcaccatggacttccacaaaggaaagtgtggccttttctttggggagatagatgacatcatcctcccagatgggggccaccccattctcttttctttttagttgttaatgagatttctgcgactctagactctagggttttaaaagtttgtttgtaagaacattttaaaacatttttaagaccttctatgagtgactgggttcaaaagataatgcctttctagctaactggactttcagcccccgcaccaagggcttctcaaatgttcactttcggaatgctggccaggagcttatacagtgtcaagcctcattccagatcttgggggcagtcaatagtgtgtggctactattggtctttctggggaggttcttctaatttgacacttttatttgtttttgtgactttgagttgtaagcttgggtttctgtaagcactcaagtttttaatactgtccgtttcttagggaattggcagggtagatgcagagggacagctcacagcatctatgatccctgtcttaaaaagaaaacttcttatttaaattatatagataacaagcatcgtggcatagtacaggcacatgcagtgcccaggaaatatctcagtatcaaatgctatgaataaaaaattagaagatatcttgaaaggctctgtaggaagccagctgatagtaaacaaaaggtttaaaaacactaagcaaagcatgtgatagaaattaagtcacggctggctgtccaactgataaaagacaaatgcaaaaaaggctaatagtttttcctgtcaccagggaaaaaccatagatagattttttttctctgtttctagggatggatctcaagggatttgggtgcagagcaagccctccatgactctgctacattacatccccagtccccagagatggatttttattttgagctataggactctagatatataaggtaatgcagtgccttgcacagagggacattttgtagtaatagcataggtactggggctatcttttacaggcacacagaaacaatgatctgaaggcaccatcgaagaaatagttcagcaattaagagcactggctgctcttgcagaggacctaggttcagttcccagcacccattggcatggtacaacaatctataactacacgtccagttgatccagtgctctctggcctctgtaggtgccaggcctacacatgatacacagacattcctacaggcaaaacacatacacataaatttaaaaataaaaccacacatgcatatacatacacataggcacgaatacacagaaatgcacacaatgaaacagggacagagctagagtgacttgttggtgatacagacagcactataacaaattctaacacagaaatgctacattttcttttcctggtactttctccaaagttacagtgtggaaatcatattatttaggttttcatatttgaatattattttgagagctttataattatttcatgatcactcttttgggtctgtctcgagccatatttcttcatggtgtttacaacgaaagcaatttcatgaactgtggtcaggaaagatccaatcaataaaactggcctatgtatcacctgctccgggagagccctacctctcagatggtgatggacttactcttagggtggcacttcctgttaagctgtgacattgcagagaggagcgcacacaggagctcctctgcctctaaagggccctcagtcatgaacaaggtgcaactcgcgcatgcaccaaacctgtaagcaagtcattggaaaagatgaaagaaaagatggagtcctgccactgttttatgattatagtatgacataaattctgtttggtttggacagagatttaaggaaatttgaagcagaaaccactagttgtgttcaagcacaaaagtagctgtttaacagctcactaagtctcccctcagacttttgcatactgtacacataaatgcgtgtttctattttgcccactttgatattttggacttctgtgtttgtgctacttgaaaacatttttagggatgaagattagaaatgaatactgctttagtatggagataagttcaaagttttgattatgatcctgtaactgacttgatttttggcaaattctcagttgtagctttgttctgaatgaatgatgctaatttaaaaaaaaatctgtttacccaggcagataacagtgcctgcctctatttccagatgttaagggggccaagcaagagactcacttgatcatgggtttgagattagcctgagcaatatagagtgaccttgtctcaaaaacaaagaaatctgtttgccaataatcctgctgttggaataattttctcaaaaacagttttgtagctcattttgcctcaggctcaagagttttcatggcaagttctgtgagcaaatgcaacggagagcatgtgcagatctttcacaagacacggaaaagggagacctctattttatttacatttgttttttgcctccttgacaacaacagtaaatacacatacacacacacccataaagttgaccttcacttagcattggctctacgtatgtggccagagcctttgggaccttatgtcccaattcccacattgccactgtttgaaaccctctgagggcaatttcagtgctatttccactgttgctctttcaaaccgttataaaatggggcaggggggggataaccctcaaagaataatgaccttccaaaatcatatattgcacaatttaaaatagtccttgatttggggccaaagggagagttttctcaaatcttctgtttgtgttctggtttcctagcaaccacttccctgatagaaattgcacattctttccaggagattccttgctttttcacacaatgtgaaaagggaagtgatcggctatttctttctgacaattgtaacaaacacaaatggccagactcacacaggacagtcatcatgttcagtatgaacattaatcttttctgtctcttaactcttacctatctccagattagttttatttgattgctgctgtgagctcagcaaacatgtcaccttcctctcaccaagtaggcagaatgatactaatgaagttagtagaattatattctgcatatatataatgagtgatacaaaatcattttatgctttttcttttcattatatagactaaacaatgtaagtttttatcacctaagaataattttaactctgtctttaggaattttttaaacattttatttactcatagtattcatttatttatatgtatagtgtgtaggtgtgcataccatatatgcatgtggaggtcagaggtcaacttgtagcaggcatctctctgcttccatcttgttagctgtcagcaaacctttagctggtaagtcacctctctgccaggaaatcggcctcaggtcattaattctgacaaaacaaattacattggcctgtgaaaattgaattaaaatatgattatgattaatatttaatgtaccgaccttactgacattacttattatcactcttgatgttgttatttaaaaaataataatttcactgtactgggtactttaaaatattatctcctatgtcactctaatacttctgtgaaagaagcaacattgtctctttgtagataaaaatggctgagaagggcaccttcaagacactaagtgactaactcagactcagaagttcagagaccatgggattggcccagaggaacctttggtgtcagaccccaaagtctgggctttaagtcgtggcctgctgtctgaaatcagcagtttctctcacaagtttcactgtgaaaaggtggcatctcactgtggtctgaagaagtcctaagcttgcagtagctaattttataaatgaactccaataaacatttaaaagaaatctatagaatctttcccatgtaagttatgttcttgtttcaagagctccacaaaaatttacaccattcattcattcattcattcactcattcactcattctttcttcagtcaaagtagcaataaactgaagtcctgcggtgaggtctgagcacattgtcagaggtctagcacacaatagctcatgtttgttcgccattctgcatgatgtctgcctttctttctgttcattgagcacactcatgcttgctaagcctgtgccctaccatggagctttgatacggtcctctcctcatccatttacataaagttcttctggagttaccacacgtagtcaatggaattaattcatctgggaaaaaaacacagggttagctactctgttactcaggctcagctccagaaagtagcttacaaggaggagtgaggttataatgccaggggcaggctagctgtcttcagaggagattggatggctcagcataggcactgagggtggggtggagtgtgtgaggacttagctgatgtagttgttctgcttcagtttcgagaaacccaggctggctggcttgctgactgcaaccctggatatattactaacagaaaatgatcttggaatcatctgtccctgtaaccacggtctctgctgccatctttacatggccttcccagttctgtgtgtctgtctccaaattttccctcttagaggatgtcttgaacttcattccaactgtaaggcagcagcctctgcttgactctccttgaattgataacgtctgtggttatatcaacaccatcagcatggtgctgctcgtttttgtgcatttttgggtgtggagcaaccttcctgtggagaaaagcttgggaactgagggcagagtacacagcagaatcagagagaacagggtgaggcagagcctctgaggctccctgagcctcaccctggaaaaagttatcttagataatgacatagttttcaaatcttctatttgaagatttgaaaactttcaaatagaaatgtaaatgttggacttgcgaatgcctgagggcatgatcccgttatctttgcctgttagtagggttttatgaagcatcagtagtcttaggtacaacctcttactttgaaagatatttctcctattttattaattttatttcctttgaagatatcttatactacactttgtttagaaatctttaataatttcaaaacaccctgagagacagaggtgatagatgatagagagatagaatgactataattaatgaattgacttatcctggagaactgtaagggaagaatttctactgggaaaacattctgaatctaagaagaaattcaaaatagaaaaagtagattcgaaggaactgggtacagtgcatctcagcgaaagtgttgagaccggatatgcttctctgggttaaaatgaaagatgtctatcctttatgtataggaaattaaatttaatataaagtgtggccatcctgatttatctctttttatctggggtgctcaggtgaagaactttaatattcatatccaggtcatctcagatagttagaggctgtggctgccttaatcttatacagtcgtatgataacttgcatagtcattcctataattttatagctataggtaccactgattttgcacttctgatatttttttttgttcaagtaacatacttcataataagggtttgtttgttttgcattttggcctatacaattaaaaacaggcaatttcactccatatggctatatagaaatcaattaaaatttattatcagaaagtgtggagtagagataaagtccccatggaagatgaaactgtctaatccttcatgatttcttaagtcttaaaaaaaaaagtcactcttttaacgtggtactagacccagagtctgttgctggttttctcaatgatcttttctatttctaaccgcattcttctctaaccatcatctaatgttcaaggtgataaataagaagaggttagtacaacatgcagtacttcttgctgtgtgattctagagctgctgcctccttatgcctgcctgggagcttgtctgcctcagttatgagcaaaagaatgagctgtactagcataaagccattgtaataacgtacccagaacaggcggcttaagacagcaggaatgtattactttgctcaagaaggcactgatcgaaagtcaagaccattgcatcaagcagagccctggggaagaatgaaccttcctgcctctcccaactcctgttgtgcactggaaagtgctggggtttgtgcctgatagcagctgcaacctcaacttctgcctctctctttacccaggagcctttcctcggtgtcaggctcacattctctcttctcaggagagatttcagtctcatgctaacccagtagctgttccttgacctgataatgttgcagagacctgcctgtcacattttcaggttcctggcagacatgacattgggaaatgactccactcattccagagtgttctgtactgtgactttgaacaactctttttcactctggctttgttcggttttcttgttcctgtcttcttgtttcctccttttccttaggagaatgtcacatttcttgcctttgaagccaaggcaaagacaaagtctcccaaatttgtcaggactgacttgaacttcagaatttgcagattgattttctagggaatacttgcgggctagcatttttctgtgagaacaaggacatgagcttcaatgatcatggaatgaggtaaaacaagaagaccagaaaataggttagctggccgtgacttggagtttccctcacttcccagcttttcagccctcgttcccatcaaacctaccctgccaagagcagagctccactcccagacctccccagccctttccagctctgcttttccttccttgctggctgttgcttgcctacttctaaggataacgtaaagatctgttcatgaaagggctcttctaatgttgtttctgttctgacacacccacgagttttaaaattcctacagaaaataaaatcaggctcctctgtgtatcctctgccttcaggattttgtgcttgtgtgttttaaataaaaacaagtttcaataacacaaaacagagaggaaatagacaactgtaggcacaggcactaagaagcctttttatgtgatagaagaaaactggcctaaccaatgagctcattgtaagatattacggaacaaagggtatgagttttcagttcatagaaagactattataatataaatcaatattcagttgagtatgtgagcctccccattttgttgtatttaacatttgtttttattgtagttactgattttactgtatgttggctcttgggctttgaacaatgactcctggaagcagagagcaggatgtgaggataccctggaagctggctttgtagctcctttcctccagtattagtggatcttagccttatttattccacacaggcacctctcctgaaaaatcacctttcagattacagtgttaggaaaacagaaaaaaaaaaaaaaatgaagagctgacaccttgagtgacctcggggcacaggaggataaactgaaccaccttgcccctgattataattgtcttaaagaaagaactcacagaagacctgtgctatagttctgtgctgcgatttaaaaattcatagcttgttttagacaaaacaaaaccagtattagctgagttcttacttgagcaaaattttaaattatctatctcaataaacagactaagcaacggctttcaactctttcttgttcagagcactgtagagcagtgtgcttcctgctgataagggaaacacttcctttcagctgatgacgaggatttggagggaaataaaaccaaatagattatcagtcctgggaaaggttttataaagatcaactgcttaaaactgggaaaacatgtgagtcacttcaaagcactactgtagtccagtttggctacactagacaccaacacactagacagtgtcagatttgcctcaaagtcgatacaaagattttgctctgcttcctttacccaggttgctggggtaattctgtgtttagacagtgaacagagcagctgagaggataagacaccgtcaggcaggtacagccaccaagtttgatagagacagcacagaactagaaatgaagaggggctaggctgtatctgactaactggattttctctagaggaattcactaagagacttgggctcacagatcatctctaaagtgagccccataccttcatgcctaactcgtgttgttaggaatttcaagcaatatactgtgcttattaaaagcatttgagaactaaactgccgtatacatggaactgtttttaaaagcttacaacttaatgaataattttgtatcttttttttttctattgctagctaaatttttagccaataattctactcctagctccaaggtttatttgtgtgtgtgtgtgtgtgtgtgtgtgtgtgtgtgtgtgtgtgtgtgtgtgtatgtgtagtgtagtgtacttttatatctagataaacttttgctaagagacagtacatagtacaagcagagcaattatcccatcattcccaaaaatcttattttgactcttttattaacctatataacaactctgagcactggagtttggaacctgatattatcaccccagagtacagtaacaggttggggtgttagcttcctgttatgtgcaaaggaatttacaaggaaacctaaaaacattaggagacacaatggggaaaaagtgatacagagccttagatgagtcaactatgattttggattcaattagctgataggctgaacctaaataaatacgcagagatgtgttacccaagctccttccctccttctctctaagggctttcacatttggttatcaagcactttagcatgtaaacagaatggcttcacttacttgtaatttagaggaaagttccatgtttgaacataacacaggttcctgggctgcccaggctcaggcagtaccagtttctggagtaagtagactgtgagtggtgtccctagagctcagcagaggttccgaggaattgtaccagctacactgcttttcggcttcagggatattttcagtgtggttttacagttggaaaagtgttacctaatctttgatggcacttattgttatataccattctccacagtctataaataatattagtatgtttgcttttacatagtgattttcaaaatggcacacacaccactccctccttgacataaaaggagaaacactatatgacatgggaaaagtctggaaacacaagtttcaggacaaagtaggagagaagcacgagaagaaggtggtagcactcagaactttgagccagaatcaagggctttggccttcttcttctctcccttttcccctctttccctctctctctctctctctctctctctctctctctctctctctctctctctccccccccacctctctctctctctctctcccccacctctctctccccctctccccctgcctgcctccttttcctctctcccctccctcccaagacaatctcagctagtacaggctgggctctcaaccttcctatgtaaccaaggataaccttgtcctgatgatcatgacactgtctccatttcccctgctaggattgcagatgtgcatcaccatgcctggctagcattgtgttctttatagattggaaattctcctattaggttctattaggacccccactcccagaattcactgtgttcctcttaggtctagatgtgtaggaataagaactcagcattatataaataatgtaatattgtttatctaaaatgaataaatttaataatgatttccctctcttgccctctctgctagggcttaaagcctaggtcttatatatcataagcatgcgttctacaatttactttatctcatgaccctcttactgctttataatggcaacattaaacttttgcacaacatctctcctataggagccatagttctttgccacctttggtgagcagaaggtttgaatacattctggcttctatggtcactttgtgctaacagattgtttttacttgacaggctgtggtggagagatgtctggaaccatgggctcctttagcagccctgggtaccctaacagctatcctcataacaaggagtgtatctggaacattcgcgtggccccagggaatagcattcagctcaccatccatgactttgatgtggaatatcatgcaagctgcaagtatgacaccctggaggtaggaagtctgattgttctccagtgtatcacaaaatcttgggtagaactagagagatccccatcttctttcctgtggctagtcctgttctatgcttaggcattctagcaagtatcctcctctatgaatggattgtgttagtagaataagggattaatatagcagtttggtttctctcctagtggctagtaacagttcactaggaggtaaggccaggtagcagcaattgggtgtcaatatgagcaaagaacagggaagggtccccagtgggcaggcttggttctgtctcttttccggatggataggaagctgagccatcagttccctctcttcttttcctgttgataaaatctgtgcttgggctctttaacagcccacacttctccttctggtccgaggaatcttccttagagaaagcattctgcatttgggagtcagtggaagaggggccccagcacactgactgcaagtgccactgacccctttacagcagcaaatgctgcctgggctgtgggatggtcaggatgctacagctatagttgctgcagagggctggttttgttttgttatttgcttttgttggttttgttttgttatttgttgttgttattccttagtgtggtctttatctacaaaaccttttcaaggctaccttaagagtttatctcacaaaattaaggtagccattttgaactttaggccttaaagtttattataatcaacttggacctatcagcaaaattaaatggtttctaaacacacacaagttccccatctgttagtgttagggactactattccatataactctacagctagtgtgtgacacagagtaagcacctgacgcctgtgagcgagcaaaagcattcaaacccctgactgatacatggtaataaggcacatacggtccatgatgattgcacacagccacattctcacttggaggtgaacagtcccatgtaagagtaggatgctgtctgtccacatattacagttgtcaaaatcaagtctcacattcatggcctttttaaatgaccaccgggatggttgctgatatgggcttggatggcattgacccaaatttccagtttcatgtgtcccagggcaaagaagttagccacatacgtagacatagaaagagttattaagaaagggaaatgagagcgggctgagggaaaagcatattcttgaaagtgctgggcccagggctcatcaccttcgtaggtcatgggcacaacccaagcctctcccactcgtggataccctagggtttacctaggatgcccttctctatacagctaggaagggaagcatttcaaggctttctctgccagctgacttcttccatatgctaatcttcatatagttttctccagcaagcactctcctccataaatggaaggcctatagaacgaacctggtcacctttctctcctctgcccagataaaataaggcatttcagaggattgaaaacagtagagagtactttatggaaaactttaatccttaaaaattatgtgatatgaagaaacagagttcttaagcaatctgtcccctaatgataggtatactcactaggaattatattcagcaccccagttccctctgcaaggagacagtgccttctcagtgacagtcctgctactatgtgatgcctccatcttacaggaggaatggggtttaggaaagaacaaggcaccttccaaaattcaccctcatagcttgaagaaagaccaccaacactaacccgtgagatgctgaacaggttccactaccaacaaagatactacatggtttcataaaacccataacgcttacaaaaggctggccgctgaatctctgttaggaatgtgcactgttccaggttccaagccctttattttcatcttccaagtacatgtcattggtgcccacttggcaaaatgtaaatgggttcattgtgctttgggtcttgtcattcccattacatgagaaagcagagatgtgtcgttctctataagcagcctccgaagcctagggcagcagagactctggccagcaagtagcactgttaggggtaggtggtcctatgccagcgcaaagatgtctgtgacaagagttggcaacctgctcaagtttacatgtattaggacaagctgggagttctgtgggctcctaagttctattaagaacatagtttgaaggaatatgtcaagaccccaaaggctataaagagtaactcctttttcatatctctgccatagatggaaagttctgtagtgacctagtgttaaaatgagcataaggaggctgtattttttgtggttgttttgtttttcattcctttgcttttttttttcttagtcactgacaatatattgacagtcgatttctaaatctgttacccagatgagtgtatgatccagaaaaacggctaactttctcaactccacacttatttttttaatcctgtcaagcacagccaaatgaaaattaccatcactagacattggactttctggggtcccctaagttttaccaggagccatttctttccctaaagaattactgtccagaaagtggccagttgcataaagcaactgccataatcctgttatgctgacttggtcttcaaaataaatggagccaacagagcagaaagcaatgctcagaacagattaacactgcaggctttgaaatactccccaccctgggcatttgctaaaaacacactttaatctctgatcagcatgccattttcagggtttagtcacactggagtggaatgaatcacaccctgaaattctttccatcctttcccacttgtgaccatacgctaatgatcagttttatttatgggcaccaaaaaatgccattttgttgttttggttatggaaatcccaggatggttttgttttcagtctccaagaaagctctgtgcagagcctggatcaacatccaggagaggaaatcccctccctggcacaatcaaacaagacaattgcttggtgtgggcagttagcatagacagggcctctcagcaatggtcatttgtgagttcagcccagtaccaggggaagcaaagaatgtccaaagtggcagtgtttattcttttggaggctcctagtcctagccaactcctagctggtatgaatatgaccgctggggaatagatgaacaaggaaaacaaacattattttgccaacttgtaggtttctttgtcagcatctagtgccagctccgtgctctctggaaatatgtgctggtggttgcactcccttgattaggagcacaggctgctggctgcatttgctggagactgtagcctgggccagaaggaaagatagacatggggaaagggcgtatgtcgaaggggccaaaggaggctcttcctgaagctctgctttttatggccttttcagggcctcccaaacactaaacatcatctcctaatgaaaataagcccagagcagttgctggcttcattcctttgcagttactggccttgtgttcagccctctgggaaacagcagtttcttcttactttaattcttgctttactgggggctggggcgggggtggggggtgggggagggagggtggattaatcagacaaagaaatcattatagattcaagtcatgtacttctcctccaaagtaggtttcttgttctcactgtctcccccagggaactctccagtgaattccctatcagtcagctgagggcttgagagtgaggaaggaagggaggagcaggaggagggaggcccagtgagaggtgaaggggtgctgcccattgagacattacccagagctgccttcctgcctggctttggccctgggtgctgtgaaggactcagacacaaacatgcatgaaaactctcatccaaactgctctgccttctacaaagcaactttgatgaaaccttggatatgggagtacgagtgtcagtgtttgtttctttaagtcttatcttcccttcacccctagtccatgcacacttaagataagtgttcagcatgtgagctctgctggaatagggcttaggaaagaaaacccctttctatagaatgtaccactgagttgagggatcccagtcagttatacagttgggcaaatttcgaggtatccatgagggttgcagccatgtgagacagacttggagggtttccacatgggagataggagatcctggccatgctcttcagtgcagacatggggaatgcatgtcacttctgtgatttccagaatatacttttgcaggttgtattttgatttcctctgaagaaacatacctgttatgttttactcctaatcttgtaaaatatccaattttcaggatagatgagatttcctaaaagtataactagataatcaacagcctttagtgaactcaacattcaaaagcaaaaccagctttcacctgagacttccaagacttagaaaaatcaatctttatactatattatatgcaatgtctctccagagaaagcaagaatccccagactgatgagaaagaagaaagcaaaagatagaaaagatcctagagtagtctgggtgttttctatcagatgaagcaaataggtattttgtaagtgattgaaagtgtgtgttcctaaggcagagggagtgcctataaatactcatttcaggtttatagttgatcccaccaagggaggctaagtacaattactaatcataatagagtccaagaattggttgcaaaaatgagctcaaaacagggctgatatgtctagatttatcttttaactaatgtcctttttttttttttttttttttgcatccttgttagatctacacaggtcttgattttcactctccaagaatagcccagttgtgttctcgatcaccatcggcgaatcccatgcagatttccagcactgataatgaactagcaatccgatttaagacagacagctctttaaatggaagaggtttcaatgcctcatggcgagcagtccctggaggtaggtgaacctacggaatcatgctgtaagcttttgagctgaagcctagatgaattttacaaaattattagaagaagacatgagagttatcccttaatgactttgtgacttctcaatatcatgacagggtttaacgttctaaggatatgaataagccaatcagtccatgtacgagcagaattgaggtggttggagagacttgttagctgaacgcatgactaggtcctgttctccaggtgacatcagaaaatggttggagagtgtactaatgctttgattcaaccatgaatccgagtttccagactctgaaggtccttgtccccaattggttttcgattgatcaataaagatgccaacagccaatggctgggcatggggcaggacacttacagttgtataggtaggatgcagagaagaatgagagattccccataactccgggaagaagggtgggatacagagcttcaggagataaagccaaccagccacgtgagattttgggtaaatggccacttcaggggaaggtttagaagtacccagtctttgaggtagccaaggcatttaaaaataagataatgtgtgtgtctttcatttgaggatccaaaaatagctcccgggtgggtgcacatgtgtgatccaccaggagccaaagcagtgtaccaaaaacttcagcaagcgtaagtgtccaattgcatacatcatgccatagactaggttttggactcttaggaaatgtaaaaagaaataagcattaaatttgtcaaatccaaaattaagtgttgcaatactgattttctgcctaagatctcaggctgtcaaaataagttacttactttaaatgttaaatactttttaacaaagtgttttaatagacactcaggcctggtgaggttagtggtgtttatgaaatggttactatatccctggtatttttctaactaataagaattattttatttaatagttacaacttacactgtgagggaattctcttgtatatcctcatcttataagcacagacaggaaacttagaggactcgttgacttgtccaaggtcccatagctgtttcctaggacagagatgtgacatgaggccaccttaagtcacttccttaatgccaagagagtatggagctatgtgaaatctctctagagtgaattacatattaatttatttgtatagcattcaggttaatccctctgcccaaaaacattgctgaaattttctatcagttgtttgtatgatcataaatccaaggagcgctgacagatacttggtaacattgtaagaattaaatacaacttatggaatgaggtctacctagaatattaacaattgcagagccagacattaagtaatttataacatcataagctattggactaggaaacatttcaaaggcaaggatgattcttagagcataggtttgaaagaacccatgaaaaaatgaattcacctgtatttaggtttcctgctgtttttattattttgagacagggtcatatatagatcatgatgactgcagactttccatgtattaacagataactttgaacttctgatccctcttctccacctctgggtaggattatgggatgcatggctatgcacagtgtattcagtgctggagtttgaaactaggttcaagtgcatgttagacaagcgctctaccagctgaattataccctacattattattttaattaacttttggcaccaatatttatagtatttaatgtattatgctagtattacccatgttcccttatttatgttgggataaatgatttaatatgattagttctttgatggctttagcatagaaccaatacaatagctaaaccgagtagggtattatctgcctgtgcttggcaccagactgcttacatttttatataacagggatatctcgagtggctgaactctgtctcctacttgcaggttgcggtgggattttccaggtttccagaggagaaattcattctccaaattaccccaacaactacagagctaacacggagtgctcttggatcattcaagttgagaaatatcaccgtgttcttttgaacattactgactttgaccttgaagctacagattcttgtcttatggtaagtggcacaaattaattaccattacagcatggacaaattttctatacttattagttataggtgttttcagattggtcataggagaccaattcctaacaattttaaaggcattgttgagagggtttttcttttggttgttgttgttgttatttgcttaaaatctgatcaggaggtagatgatttaaaggtttgttcagcagctgtgttgaaatagcttcaatagccttatctcagtctattatctgacaaaaagaggaaagggcagtgtgtgtgtgtctgtgtgtgtacacatgtgtgtttgtaaaccatgatttctatacaagccttcttatgcacatgactgtgcacaaagctgtggaaagaattgtcataactagtttaggtaggttatcattaagcttctgcggtcccaggagagttttattttttttatgattagagtttttcagttcaaattaatactctgataggaccaaacaggctgggaggttggggttcagaaagagatgtagctattagtgggttttatagtaagatgtttttgctgctaccaacagctaaagtttctgactcgaagttaatatgttggcagttaatgtacgaatgaatgaagtattctttatctatgtaatttaaagaggtttggcaaaatattttccatgtttcattggtttataggtatttcattctaacacaaacctggctttcttgtttaatggatcttcttatttcagctttctgacagcttcttatacacattccaactggctgccttcttttaaaggtgactcaggaaaatccaaaaggttttccacgtttcaaaatcatcaagttgattgtgtgtattttaagtattattttccaaggttggatcattaggaaaagtatatgcgacttatggttatatacttacaccccatacaagtctttagagtcagagtgaataaggtatcatatggaggacatctattccccttaatggtaatttggaccaactctcctaaaaggaatatttaaaagttggatgacatttaaatacatctttctaaatgtagctgtgtcttacttaatacgtgagaggaaagtgagcacagaatttggagcagtctttgcctgcaagggctttggccattcagagaaggtcagcaatagttctggggcttctggagcaatggggacagtgagcccatggcctagggagctgcaggtactgcacaacaattatatcctaagtaatatgaaagtataatagcttctacagagactgcttctgggcttccagtcatttgcatgtcaccagacatctcaagataggggataaaggagaagagatcttgtgttgcttatatgttaaggtatagataattggaagaaacactctaaagccttctgaagggaaatagaatcatcttagacccctgttttcatgtgcaatagcctgcagcttgtcacaggcactcgtccacctgacaggatgctattgtataaatgagatgcagcagaacaacaaaccaaactaaacctgctggcatgccaagtactgaggccaccagacacatgattaccaagatcctggagataaaaaaaatcaaactaaaacatttcagtaaaggattgcaagctataaaaagtcacagtgcaaccctaaaaaagaccaaactgacagttctagaacaaaaaaacatagtgcctaaattgaagactccataatgtttgagaaaattagattaagatgaagtgagcaataaggaacaggaagataagtcaagataatgaccgtgaagaaaagcacaggtggacatgagaggcacagacacgtgaaagagattcatagaaaccctagaaggaaaagagcagagaatcaaacagaagcaatagctagtgagctaatgatggattaagacttctgaaagtgataaaaaaatttttaatgaaattactcaattcacaagcagaataaataggcatatttacttaagaaaaacttaaagtgaggggtgggttgggttggggaaagactgtctttcagaatgttacagatgaaatgctgacttcttatagcaataagtaaaagcaaacaaacaaaaggtaaatggaattgtatgttccagctaaagaaagaaacattataggattgtaaaaattctttacaagcaaaaccgaaataaatattgtttcaaagaagggtcgtcaataggagtttaaaagggttagaagcatactgtctactcatagactggggcaagaggcagctcttcactcccccctccccttagcatccacggtgtagctgagtggagatacagttcttcctgcattcatttcatgatccctagagttcaacatacagactgtgataaggtcaaagcccaggttagaggcacacccagtttgggagtgtttttcctttctgtgttcatgaagtgactttttttttccatagaccttggggacaaaaacacagacaaaagttgtgttaactacccacatgtctccatgcatatcagggcttggcttaaccaactatagcagtagagaatgggcaagaggaagggaaacctcatagtatgtcatcagaggatagagctgggtgtgtaaactggcagacaggtgctgggtgggatttagcttggcagatacatcaaaacacaaaatgtgatcagaacacattgacaggatgaaacagctggtgtagcctaggcaagtggacagaagggttctgagaagcaggtaccctgaaacactcagcaaagcggcatataaagggtaaaccacatcaacactgtgagttaccgtagtgcattggctctgacatctaggtagaatgaacctgagtctagcccagcacggtcattactagctgtgctgcttgaggagaggtcatcattcagctttagtttcactaactggaacaggttaataagagggctcctgacacattcattattgatctgagaaaaggtggaagacgcgcttgctgtccaagagaagctttcaactgtagacttcagcatgcttctgttactgatggcacgtgtgatttcaggcaggcatgttcaacaagcaaaagaagaggcagcatggaatgctgggagaatcactgggcttaggagcaagtagggagtgcctcacctctgacactgggcctcagactccttagatgcagaaggttatcaatcttccttatagaattccagctggcacttagtataccaagaaccttgcacactcccataattataacaagaaagtagcagagaaatgattcactgggtcctggaagctttcacactggaggtggcatttaagtgacaaggatcacagagtaaggtaggggtgagggaggctgccagagaaggaaggaaggaaatagcacatggacttcagaacgggaaagacaagctttgtgcccgcaatgtagacagttgttaagaagcatggagacgaaagaaagccaaaagaagccatctaagttgaatgcgctactgtacactttccattggatagaggaataggtcgctcacaattgtgttttacaatgagtggtgtaaggaataagttagtagagaaagaaaatggttcaatagagactcttgaaccagtggggaatgcttgagtgataaagccttattttgggcagttgtcttgagaatggaatccaggcaccattcacactacagatctgtcatgatgaccaagaggaagacccatgggccagttacatgatggaaggaggatgggtggcagaaggtggagttagttatttctgtaaagagcacttgaatgacaaagcaatcaactgaataaagagttaagctaggaagtgtttacatggctaccctatagagtttggtactcaaggtgggggtcataggtagagatctgtatctgtatctgtatctgtatctgtatctgtatctgtatctgtatctgtatctgtatctgtatctgtatctgtatctgtatctgtatctgtatctgtatctgtatcatctgtatctgtatctgtatctgtatctgtatctgtatctgtatctgtatctgtatctgtatctgtatctgtatctgtatcatctgtatctgtatctgtatctgtatatctgtatccatatccgtatccatagatatatatgtatatgagtaaatgtgtttttacttggatagttcttaaagtcatgggaataagtatggtctcttataggaggattgtataaactcttagaggtcatgccactaatcaaggggcaaatgaaagctaagagaacaagagagagtggtctcagagacacctaggatgaagctgaatgtaaaaagtgggtgacaaaaggtgtcacacgaactagaaatgacagtgtaataagagtggaaacagaatcactgctcactgtgggtagttgatggaagactctagatcacatcaggatagaaagtgccgaacttcttgagtgttccatagaattatagacataagtggcatggatagataaaaggcaataacctgtggataaaagaaatcaatggaaaattatactttaaaagtcataggaaaacaatatatatatgtgtatattatatataagtcataggaaaactatatattcatccttatgatatattgatatatatatctcacataagggtgaggtgcttatggtaaaagaacagtcaaatgtaagaggcaagagtaatggttgcagtcatgttatcagtacacagtgttagggtttgaatctgaggtatctctcaaaggctaatgattttagcactcggtttttagttgggctgctatttggagggagggctgtggagctttgggtgttggcgtaggtcagcagacacttcagtaggtcactaagaacatctgtgtgactcttatacttgtcccacattctgaatttgttgttttctggtttatgctatatgagttattcagctcctgtgttcgtgacaccagagatggagcctcttcatcactatgctttttgtgtcatgatgagctgaagtggccgggaaaccatcagctgagtcaagaccccccctccctttagttgcctctgtcagatgttctgttgctaacacaaaattaaacaaggcaggaacccagatggatcctataattgtatgtctttagaatgagaaattagaatacatgtcctaatatttttctgatttatacatttatgttctgaatggtataaactgtataagctaagtcgtcttatatagtttggaaactatcttcacaacaacatcattaaatataaaaaaattacacaggtacattagaatagagatctgctgtgcacagttgccaagtacactcagttgtgggaacaggaggtctacagagatttggagccggtctgggcaatgctccggtaatgctggagcctggctccaagatgtagttagttatccagagattcatgaaggcccacattgaaaccccagccatttatctttatgaccagatggacactggatgtgaaatgtacccccgtgtccaaaaccttacataataatctctgtagcttaagctcatacaaagctaatcattcattttagagacacaaagttaattccttggtcctggagcttagatagagccattagtaaggggaaaaaaaataacagcagccaataatgctttctcaaatgattgtattcagggcatttttagcaaaactaaagtgtaccattaataccacggtaaactaggcttaaaaacagggacaagtcatcctgtttatatgaaaatgtagtaattagttgattatagcaaaaataagaaccgtcatcgggtcataaagacacagaatgctgaagtcaggacacattacaaatcatttagtatcctctccataaaagtctcctttaaaaagagggcgattaatagagcctatgtcaaggtccagcacacattaatagcaggcccagtactcagaggtaacccttatcatacatactccctaaggtaagaataagtattttgataaaatataaaaattgtcttctatttctggtgaacctagacttgaattctcactgaaagaaaacatttaaacatgaagtggaaaatgttcttgtttagaagttgggaggtctacattccatggactagctgcctcattcattcacttgttcattcattcattcattcattagttcattcaatgtaggtattgattatgagcagtcaccacgaggccattggtattgagtgtggcatatcccccaccccctctacccttgatctaaggatcttagtttgctacaggctctgagaacctgggacattcaagaagagcatctgctttgagcccgtgcttgtgagaaggaagagggaaaaggggttgaccaagcccgttagtcaacaggttctccagtgcaggagtgaggattaaaaagaaaaaggacagccagacaacattgtagcgtgaccccagtcaattctgaaactgaaggcacattttttattttccaacccactttttttttaattaggtattttcctcgtttacattttcaatgctatcccaaaagtcccccatacccacccccacaatcccctacccactcactccccctttttggccctggggttcccctgtactggggcatataaagtttgggtgtccaatgggcctctctttgcagtgatggccaactaggccatcttttgatacatatgtagctacagtcaagagctccggggtactggttagttcatattgttgttccacctatagggttgcagttccctttagctccttgggtaatttctctagctcctccattgggggccctgtgatccatccacttctgtgtttgctaggccccggcatagtctcacaagagacagctatatctgggttctttcagcaaaatcttgctagtgtatgcaatggtgtcagcgtttggaagctgattatggaatggatccctgcatatgacaatcactagatggtccatcctttcgtcacagctccaaattttgtctctgtaactccttccatgggtgttttgttcccatttctaagaaggggcaaagtgtccacactttggtcttcattcttcttgaatttcatgcgtttagcaaattgtatcttatatcttgggtatcctaagttttgggctaatatccacttatcagtgagtacatattgtgtgagttcctttgtgattgggttacctcactcaggatgatgccctccaggtccatccatttgcctaggaacttcataaattcattctttttaatagctgagtagtactccattgtgtaaatgtaccacattttctgtatccattcctctgttgaggggcatctgggttatttccagcttctggctattataaataaggctgctatgaacatagtggagcaagtgtccttcttaccggttgggacatcttctggatatatgcccaggagaggtattgctggatcctccggtagtactatgtccaattttctgaggaaccgccagactgatttccagagtggttgtacaagcctgcaatcccaccaacaatggaggagtgttcctctttctccacatcctcgccagcatctactgtcacctgagtttttgatcttagccattctgactggagtgaagtggaatctcagggttgttttgatttgcatttccctgatgattaaggatgttgaacattttttcaggtgcttctcagccattcggtattcctcaggtgagaattctttgttcagctctgagccccatttttaaatggggttatttgattttctggagtccaccttcttgagttctttatatatgttggatattagtcccctatccgatttgggataggtaaagatcctttcccaatctgttggtggcctttttgtcttattgacgtccaacccactttttataccattttaattacatgcaagtattttgggcaaacagtacaataagtaactaacaaagcagcaagtgattactcccatgacagtttaaaagggcttgtcataatgaccaaaatacctgagcccactttcttgtccaagcccaaaatcttgtctgaagcctagttctgttctaccctaagactaaaattcctgcctttccctacttctctattacagcctgaagttagattcttgccaaaacttacttccttattatgccctaatgtcagattcctgcctgagcttacttccttgtcatggccaatgtcagattcctgtctaaagcccatttccttgtctttggccaatgtcagactcctgccaagtggtactccagaaggctttccacaggaggttacaatggatggtaagggcaatattctgtcaaagtctgactctcaggacctctcacattcagtctctggaatgcaagcacagtggggtttgagtggcagtcgcatctttctctctgtgtgttcagatcacagctcatctagaagggaggacaagcccacagatagccccaagctggagcatcaggactgaaaggcaaacttcagcattcagaggaaacaaattaaaaattaaaaatagagccatcggccaaatacaacctcccctccccctttggttgttcctatcaggtgttctatcactgtgatgaacaattaactaaggcaataaggtaataaataccatccatcttctttcatataacccacagcagtctgtacccataggcagaaatctgatgcatggattcctcctaatagacacaccgtaattatatgagtgaatgagtccttgccatctgtactcctgctgggatccgtgcattttaagatttgcagaggacactgtcattgacataggacctcattattttgagttgcatgaggacttagaaaacatggtacagatgtgttgtctagaatttcattctgctataatgaaaagggagggaaactgatttctttcaacacttctattaaaatgttgaggctcccacacacagctgacttgtactgggcttcatataatttggtaaaatgtccgtgattcctgcttgcctgctttccagcctggtgttagctctcctctgactttggggatgataagtcatgagtgtttaatgctagacagcatttgctggctggggggtggctctgtgtagtcatcagggaaaagtgactccattatgttttctttcctgaagggtaagtgttaaagtgacctccaaccgccagtttaattgcttcgttagaatttctcttctgagccttaggtactatgggtctgtaagttcttattgatctgggagaaaacggctgcactctgtgtgagaaggagggggagggacagactgcggtgggggaggggggagaaggaagggctgctgagaggctgacctctgtttccagcagcctctgtgctcagtgcaatggaatgtctgccttgtgtgaatcagtgcagataaaaaagcaagcagagcacaggccatcctgcctattatttgcaaggagaaatgcactcaggcaaacagctggagcaggaggaggaggaggaggaggaggaggaggaggaggaggaggaggaggaggaggaggaggaggaggaggaggcaagcagcccctaactggttcggttttggttgtttgtttttcctgaagcttttggtgactgtctaagggaaaaagaaaggaagccaagtgtctgatctgaactgaaacaatccagacccacaagcctcactctgaggcaccagagcctgttgttctcacattatctgcccacaacacccagagctcaacaggacaggcgcctaaggcagggtccataatttgtctccccccaaccccccttcgatgcagcccatgatatgcttgcatttaaaacacagtcacttcccagaggggactgaagggagtcaggagtaatcgataactagagtttcagagaaagggaaacagccttctttaaatatttactgttttacaatgagttcaggacagtcaccctccttccttctcccctcctttttaggtcctccccattctccttttctctcccttcttcccttctttcttgatccccatcagacgttttaggttgcttgagcaagggctttgaaatgtttgttttgtgattcacttgtgataatctgcttagccattcccatgcctatgtcaaatgaatctccggtagctatgccaaagcaaagcaaggaactgagctgaagccacagctcatgggccagggtatttatcatgtttgatgttcatgttggctccgtctttttaaacgtttccttcttgagggatctttacggccctgctcctaggcctggtcacatctcctagtcttttgaaaaatgtgaaggccgaatggcatagtgtacaataacagcttaaaagtaggagtcctgaactgagatggaagtttgtcaatttaacttggttttccatttcagaccagcgtactgggaaatatcattaatgcggaagcccagcttccttcctctctcccctcaaaaaaagccattgcaaggagtcaggtttctgtatccttccctgattacatctatgactctaacagcatggaccatatcccgagagcctcccttctttgtcatttagtacttcctctcttttggggccagatttgaagctgagaattcccttagcagctacgctaccatatataacatggaggtggttcatgagttctctgttctcaaggttgattttgtatcttgatatggtataaaccaatgacacgactgctccacgctatgggaagattcgattgtgcatcagagagaaaaaatatacagtggcatctggaagagcctagagcaggtagaaaaagaagtagactgaacacagccagaagactggtcatggccagtgctatcttccagagaggggaaagtagcagaggagagagaatagagaaagtctagtgaggctagacctaggttataagaagtgggggtggaggtgggtggagaccagcgggtgagcattgaaatgtataacaaatacttgtgaatggggactgagggagcctggggccagcatggacattgatatgctgagaggtgccagaggtgtatgttagttggagaaccttttgtcttgctggaggtaaaggaaaagactcctttggtagactgaaactgacttcacaagttcctgaggaatgctgggctttatctaacgtccagaaacccacctttaatccaggttgggcccatttctgatattttgagtaccttttggagtttgggggattagagtttactttggacctgacagatatgaatagttcttttactgccatagatcttgcccttcccatgtttcttttactgtgctaagatttaattcacttaagcagagacatgaattgccagatggagttcaaatctcgtaaagatcaggatggaagtgaggagctgtgctgtgccagagatctgcagttaggcccaggaaaggcagcatgcagacactagtatacccgggtccaagagcgcaagcgcatttagcagtcaggaatgtaagttttaggtttatttgttagccttcactctgggctgttggttagacaccttgatgaattagccatgctggtaatgctatggctgttcagtggaatgcgtgactctgaaatccacaggagctcaacacaaggctttctaaaatgtccctgtattagtcaggcttctctaaaggaaaaggctaggtgaacttgccagttagaatgagggcaagcaggcaaaaaggcaaaagcttctttcttccttatgctcttatgtgagcttctaccagaagggaggtgtggcatagagtttgagtgagctttatgacctcaaatgatccaaccaagaaacccccctcacaggtgtgcccagctgctggggtcctcattaattctagatgaagtcaagttgacaagcgagattagccatcacaacctccaaggatgccctattgcagtcttcaaaatgcgggaagctccaatgattatctttctaaaaggtcatggggaactcatgtcacttcacagaattctggtctcttaatattgagttaaatgaatgcaatttgtttacctttcccctccatttaatgataatcaatatgatgtcagaaagacatgatttgtactgttctgagctactattacgtatttgattccaagtcacttacattttctaagtcttttaaatttccaagctgcaaaatggggccataagaactaactcacaaactgtatttgtgagcacttataggtgcctcatactatggtttgtctgttcctgccaaagttcccattactccttcttctagcctggttagtcatactatgttaaaagtcttatttatcattttacattgtggaccttaggaacacagaactgatccagcatcctcagctctttgcccaccaacatcattaaatcataaatagtccccacttaaaaattttggtgttttttagtcttcaatgtatcatcctaatgaaattaacatgtaagtacacttttatggactaattttgtattcatgtgggtatgcatgtggaggtcagaagacaactcactagaactacttctctccttctgtcatgtgagtggatcccaaggctcgaactcaggtcatcaggcttgtctgcaggtgttcttacctactgagccatttcaccagcccccgcctaacacgtttgaccatgctacagttgcattgttttgctatttcccagaagactggcaaatgaggggacaaaaagtatagtgccacaaatggaaataaaagtatacactgtacattcccagtttctcctcctgcaaagctcaacttggtgcaattcattttggccctgcaatcagggtgagctttaggtagtaagtggtgactgatagttccatcggatgaacatgagccatttaatctcttcagggtcatgaacagaacagagcaggtactccaggctgcagtggttactagcagccacactagtcacatgttcttccattcttaaaggtagccactagtgactgcttatctctgatgtaatctgcattacctgaagggttcttcagttttcccttgcattggacttcagagacagcacgtggcacagtggcagttgcctggataccgaactgaaagatgacacaaagccaaggcagaaaacaactgatcaaggcatgagcccagaagaggctccaggcatgaggagaagagatggaaacaaagttgtggcagagcatatggacagcatgctgacccactgggttgggaactagaggagagatgtaaaaagttttgtcataagtattcatgctatttaatagctatctgttacacaccaacactataccagaaacacttttaattctatttacttatttagttcgccaaaatagtatgtgataaaaactaatattagcgccatttcacagagtaggtggctgagtaatgattaggaagtacaagatagggagggacttgtcccccaaagatgaaacattacctcgattattctagtcccacatagaagcttataaagatgttttgctaaataagattatttttccaactaaaagaaatctgccatcaatatttcaatgtcacatatagttcattagtaatgaatatttatatcaacatatcatgtacaacaaagtaaaagattctaactgcatttttttcaaatagccattctgtaagactctgaatgtagagcctttcctcccagaactgtaaatgtcacccagaagggatgtcagtctctcactggaatgattatcttcctaatgccacttgatgtatgacgaggagaggcatgtattaacctggcgttggttgacatttagtcaaattcatgatatatgatattgaaatgtcaaacatgaaaactcctaatccattagctcagttcctgcttctggctaaggctcaggctatggaaagagcggacacattgcatgatgtatccagtatccgacatacgctgggctgtgggataagttcaaagtcttggaccacctcatccttcccccttctctcacactgccagagaaaggcacctgggagctgagtgtgtagagttggctatgtcctgtgactgcacccctgccctttactccctgggcctagaatatagaaaaccttgcatgacagcagccacaggggacctggcatcagccacatttgacttcacctcctctaaagagcttcttactattgagcctactttgttttttatactccacctaatgtgggagtgggcagcttcttcttagggctttttctcagcctagccctctattctcagaaactataaactgacacattaatacatttggcctttcctggctattatgtgccaggttctggactttttctttctttttacacacaaagttacatttttgggttattaaatatgtgtactagaatcttgtgattttatactatccccaatcctttcctgtggaaatgtttagcagttaaccagatcttctgcaacttcttgagaactctgttagttggaactcacgaacatggttgctatttttaattttgtggattcagcatcaaaaatcttatttcactagtgtcacctagaggaaaaaagtaagttgagagttttgtcttgtgtgtatactgctctggcatttcttatttaagtagcaggttagaaagcctagtctttcttggcagcagacttaagaattacttatgctatatgaatatattaaacacatatccaatggtgatacaattactagctctgctttgggagccaaagtagaaataaagggccatacatattgatagttttatggcagtacagctttaaatacgcatgaatagagcttctcatattttctttcttgaagtgtttccttataactttgcaaattaaaaatcaaaatgcaacaccattgtcttaatattgcaaatgctgaaagcactctcaagtagaattgatatttcaaatgaaatttaaatactgtctcattggttgtgtgaggctttggaattttaccaaatgataattaatatgcataaaatatttatttatatagccagtatcttattatagtctactgtgggcatgaatttatgatatcctgccgcagtcttccaaattctggggttacaagcacatgacaataaaccagctatcaccagtgctttaaaagaagcactgttatgtagaatttgacgagtgaagattcatgctcactagctgtgtgatcttagatgagctactagcttatcttgggtagggcatgattttataacaagcacattagtctcactttatttaaaaacaatcacatgttagtgcagactaatgagatttgcagtgatgctaataaaaagcatgcacgcacacacacacacacacacacacacacacacacacacacacacatttagtatgctattggtacataacttcaatttaactacaagaattgcctaggaagatgggaagagaatctcaaggaggcattatctacattaagttggcctatagacatgtttatgggggatttgttttaattcattgacatcggcactttgggtggcaccatttcttaggtaaaatgatctgaactatataagagtaatcaaactgagcacaagcaaggaaggggctttgcatgcattcatttctctctactctgttcttgaatgtgctgcgattgaatgtgtatttgaggttcctgccatgacttttccacaatgaaatactgtaaagtagaattataaactgaaagaagcccctttcttccctaaattacttgtcagggtattttatcacagcggcagaaattaaattagaacatttttttttaaaagtgtggacttggagaggttcaaatttctattatttgggaagttagaatatacttattagagtctagtattttaccagagtttaagaattaaaccaattaagaggaatgtttgtgatagtttatatggtgttttggctattatttgtctaaaagaatcaaccatactggactggaaaccatgtttatttattttgaaattctcattacacatccacaatttattttgatcataatcagtcctcagaacccctcccactcgtcctgaatccctcttcacacttccgtgcccttcgtttgcttccttgcttaataaatgtataaactgacaagacatctattccatggtatgatgaaggggggaaggtttttattgtgtatatataagagagtgaacagctagaggcagctgtatgagtccagagcaaagagagaaagcagcagactgaccatagcagactgaccaaacctggccagggctatttgtaaaagaggcatgagaagcctgggtagagaatagagaaaacagagtgagaaaagcaagagcagaccatagaaaacacatggagggtagcagagctataaagataatgggtagctgagggatagggatgtgaagagaaacccaagggccggaaggagtttagaaggaggggaaagggaggaagacttgtccactaggatggactttgaaatgtgcaacaagctttgtctctgtaactccttccaagggtattttgttcccacttctaaggaggggcatagtgtccacacttcagtcttcatttttcttgagtttcatgtgtttaggaaattgtatcttatatcttgggtatcctaggttttgggctaatatctacttatcagtgagtacatattgtgtgagttcctttgtgaatgtgttacctcactcaggatgatgccctccaggtccatccatttggctaggaatttcataaattcattctttttaatagctgagtagtaagtactccattgtgtagatgtaccacattttctgtatccattcctctgttgaggggcatctgggttctttccagcttctagaagtgggaacaaaacacccttggaaggagttacagagacaaagtttggagctgagatgaaaggatggaccatgtagagactgccatatccagggatccaccccataatcagcatccaaacgctgacaccattgcatacactagcaagattttatcgaaaggacccagatgtagctgtctcatgtgagactatgccggggcctagcaaacacagaagtggatgctcacagtcagctaatggatggatcacagggctcccaatggaggagctagagaaagtacccaaggagctaaagggatctgcaaccctataggtggatcaacattttgaactaaccagtaccccggagctcttgactctagctgcatatatatcaaaagatggcctagtcggccatcaatggaaagagaggcccattggacacccaaactttatatgccccagaacaggggaacgccagggccaaaaagggggagtgggcgggtaggggagggggggtgggtgggtatgggggacttttggtatagcattggaaatgtaaatgagctaaatacctaataaaaaatggaaagaaaaaaaaaaagaaatgtgcaacaagtacttgtgatactgaaggactttggaagccaacagctttggcatgctgatagacaccacaggtagtcatacatctctttggccagaggtaagggaagtgactagttttggtggacagaaattcacttcacaagttcctgaagaatcctggttttaactaaccatcagaaatcctcctatagttcaggttgagcccatttttggatatttggagtgtcgtggagtttggggaattggcggttattttggacctgagaatgactgtgctgcccatacattggagaactgtacactggagcatgaacaaggccaatagcaataaagaaaactgccttaccgttttctatcattcataggctaccataactgctaacctagggggtagagcctcttgagtccctcccttatccatgttgccatattgactagcttgatcttatgcaggcaaccacagctgtgtgggtttatggatgcaaagacccaatcatgtccaggagatactgtttttacagcactcctccctttttgctgattctacagtcatatctgctcccttcttcctggatattctctgagcttatagggaaaggtgtgagccagatgtcctgtttatggctgaatactctctgcagagaataagtgactggtcaaagtgatcagtactggaaattacattttaaattggctagaagaatataattcaattttcagtcaatgttggttgaataaaaatcatttttaaagcttcgcttactgaatgtttggatttgaaatatgaacactaaatgataagagggggagggagaaagaagcactgttctagaaccacattgactttgtgtttgttactctaaaagcctggtccctttttctgagaatttaaatcctattgctatcttattcccatgcttgcacaaatcaactcagaatgccctcccaaccctgcttatgtgagagcattctgatcatatatctcactagatatttcaggttacttgtgaataccgtccttactttagatttttgaatagtctgttatctcctctaaatttttagcaaagtatagatagcaattggtttttaaggagacagtcattattaatttaatttaacttatttcagatacttaatatattaatatatctaccctgttcaactgatatcttatattggataaaataagagtttcaagtttagtttcataacttatatgtgacttagattgtttatgagtttgttgatagagatataggtagagaaactgctcggaagagtcaatgagaaaggctgaatccattttcagtcagagtaggtacttaacaagtggcagcaagtattgccatacaagttcaagggactcatttatcactggttcacacataagtgttcagaaacgcatgttagctcagagtagcagactaatgaggacatttgagtttcatagagtgatgtggggatttgggcatacaggatataaacttcactccactggcccagaaggtagggttggagcagttccagcatagtcctggacagggatagaatttaatagatgtctttgaatgaggtattttttttcctaaaccaaactaatctcactcacattattagaagtattctgtcatttcttttgctcactatctatgatcctcgaggggcaaagggttccaagaatgttctgtttctaacaatgaatggttgctcattatagtctctagacactataatgaccaaatcctaagccatgttcctggatagcaagataatgaaataaggcattttttttctagatccagtcaatgtgatattttactagttcattgatatgcagatagcccacagaatatgagtcttatacatgtgaacttgcggtattaagacagttttctgtcttccatatttgtagacatatgatggctcaagttctgcaaacacccgtgtcgccactgtgtgtggaagacagcagccacctaattccatcacctcttcaggaaacagcctctttgtgagattccagtctggatcttccagccagagcaggggcttccgagctcaattcaggcaaggcaagtatcctatgggtcacctgagccctccttagtggtataatggcaccagacttcagaaactgatcacagcttccaacttaacatgaaaatgttcagaaatcgagacttgtaagtattctaactgttctacattttatttatcttcatctaccttaaatgataatgatgtcttaggttatgcatatctcttaagtgctgtgtttttagagtaatgtttaatggtatagtatcagtgatacataagacagaattagccaagttaatttccctagcacttatccaaggaaacacaactgggaaagagtcaggttctacttgcccagagtggttttccttgttgctgaatcccatagttttctattgtttttgtccttaagttactgccatttctcaatttcctctcccaagcattttcacccattgcctttcaccagaattttctgagattaatctttatcaaaccattagacagggaaggaacacagagattagagggattgttaactggtttgaattggggccatgatttttgtcgggatgactcagataatctatttcaaatattttttaattaaatgaattgtacatatatttacttgtaagtgtgtgtgtgtgtgtgtgtgtgtgtgtgtgtgcgtgtgtgtgtgtgttggtgcacatgtagaggtcagaggacaacttgtgggactcagaactagactcagttctctcactgtctggacctcagggattgaactcattcagcaggctgggtggcgactgcctttacctactgagctatctcattggccttgcctccaataatgtttgcctgcttaataatcatatccctgtctatatccatattaggagacttataggtatcacattagtgaacgatcctggttggacacaatttctgagtcagtcctcccaaaggtacactggagcaagacactaggtgtgctctatcattcttggtgatttcaaagacaaagcagtacttaacagtcatatatatatatataacatttccataggtgcagcttcagaatataactttcctattggcctgtctgatcttcagtatcagcctcctcaaactcacccacccttgctccatctttctaccaagtaacttgtaagagatacactctcatcagattgagggtcctcatggctgtccttactctgtgtggcttagatgaaaggcaagtccctacaactgttcactacagtccccaagccagtcctgaccctttcacaatgctgcttctagttctacctaagctttataagcttcagttcagactgtataaccgtggccctcctcacccatgtcatgctcaggctatgcattccctccaccattcttcttactctccacaccctgtctcagtcctgcctcctccagagaccaggacccaaccatgcaacacatcctcctctcctccgttcccacagagcattgagcttctctgtttaacttgaaatcatcttcatacatggagtgtttcctagagaggaaaaactcatctatgaataaattattccctcttataatttatcagcaaacagagtaagtgaaccaaggccagagtatgagttgaatgattcagataattcacaactgtttgtggtgttctatgccgtgtgtccccacttcttataattgaaagacattataaatgtaaagtgttttctcattatctggtggcttctttgcggcttccttggtatgtgctatggaaataagaagaatgtatttgcattttcacacacctaatgtctttatttggtatagttgataggaaccaaaagtgtatgacatgtgtgtctgtgcttcccagagtgcggagcccacatcattactgactcttcagatagcatctcctctccactgtacccagccaactatccaaacaaccagaactgtacctggataattgaagctcaacctccatgtaagtaacaaaaatcaaaaggaggggagtctggggaaagtggctcttctgagaggtaaggctgtgaactgcatttaacctcctcagtggcagcaactgacaattggcttcttcctgggatgcatggaaacagacactttctggcctagtacgaaagcacttttaaaaggattcgcattcatctaaaagaattgttaagtctggatgtggcgattctagcaccctgcaggctaaggcagaaggattttgagttggagaccagcctgggctcaacagtcaattcaaggctcgcctgagtaacatatggagatcttgtctctgatgaacaaacaaaccaagggctggggagagctcagtggactgagtacctacctatcactattgaagccctgggttctatccccacaactaaatgaatcgcatttagttaatggtattgcatgcttgtcgctccaacttctggtaggagaaccagaagtacaaggtcatcgtccattcatacctagttggaggctactctgggatcagtgagatgctttgtgcaacaacaaaccaacagaccaacaaaaagacaaacgactgaggatgcagttactagaacacttacctgcctgaaatgcacaaatacatacaaacaaagtgtacaaatacaagtaaagtagatggtgaatgaatatgtgaataaggatagagattggagaaatacctaactgttggaggacgcagggttgcaagttattgatcactaaaagggaaactaattgtaaaacctgatctctcctgcaatggatatatttatgaaatcagtgcatgcctagaggccctcaataaatgcttattttctctttcttcttttggggatcttagaattctgctatgtgacatggcaatagtccctccacattttccaggcagagaaaatgagatggcctttacaggcctggcagaatggctccaagcagactattccaggcctcattatgagtcctgtttcatctgaaccctcccctcctttcaggtctctaggaagaagttgtgatttaagacacaacgtgtgaaagccattaagttctcttctctgttctttaattaatgactttgtaaaaacaggacagtcacttaggctaatcaggtccctgcacaaaataattctcaaaaaagctggccttaaatattatctaacactttcacaaactgatagtattttatggccattcatggaatgtgggagctgacagataatgtaatccttagcctttgtacatggagagggtggagccccaacaaagccaagataaagaagccccctgcattgagctcagcagttttgtgcctcctgattattttctaatgatctgcaaaaacatctagatgaaagatctcaccgctacaaggacagcaacaggaaaagatccctttctgaggattagaaacgctgtaaagactacaagaggaaactgccatctgggcgctgactgttcttccatgattcaaagctttcttgatggatgattcagaagctctcgggcactgcttccgacccctaaataaatttgagtgtgctgggagccatgtccaggggggaaaatatgccttagtacaagtacatgtaaggactcagagcctaagaaagtgcttctcagaggaacacaacaatggctaacaaacaacacaaatagagcaaaacataacaaaacaaaacaaagcaagccgaaaactatgttttccaataagatgtctccagaagtccctgggatgaccctacccaagagtcctgatttaccatgcctggcattttggattctgcaggcatttttcaaaagcattgattctgttactcttcaaaggaagccctttagcgcgaagctgagcccttagctctgtttactcaccccacccctgtgcaaagctgccagaaagcaagggatttggcatcatctcagagtaccaggggcaaaatctctctgttctgcttgccagtgttttattaaataaccaacactcttctctctcttttttttctacagtcaatcatattgctctctcctttactcactttcatctgcaaagcagcacagattgcacacgggactttgtagaaattttggatggcagagactctgatgcacctgtccaaggtaccggagattttgtcatttcatctgtagtcttgtcacgtagtgtgtgtgtgtgtgtgtgtgtgtgtgtgtgtgtgtgtgtgcgtgtgcatcccaagtgtgcagccatgcacacagacattcacagtgttgacattcaaggttacagtgttttcaataagcatgaagagcctcaaaccacataagaataaccagagggtaggaaagcaggacaatgtggggctcatgaaattcaacttacttatcttctacatgcaatttgtgtattttaacttgtttctgaaaggcaagttgcagatactaaatgacagtctgaggcaggggcagtagtgtgacaaagactgttttggcattagacaaaagtctttctgaagcttctggagagtactttaaaatatgtcttatactccactggacatgtttcttctgtccccagtgggaggaaagcatttgaaaattagttaattgacttcattaaaagtccaccagttggtgtgctagacatcatgataaagtgtgtgatatagctcttgagatggttcagacaaaataacttcacatgctttaagctttctccatgagactttaccatggaaaagtctccctggcagagggaagcgccatcagaggaggtttcaatgctattcctgtgccgagaatggagcctgagagaatggtggacaaagaacaagccccaggcaaacccctcattgtaatgtttaagatattaatccattcacattggaacaggatgtgttatagaatgcacactcctacccagttatctcctgtggagtactgttctaagtattttataagtggtaactcagtctttacatccttatgagatgggtttaattatttctaatatgtcctcctcttcacatggggcaactaagtcacagagcacccacagtacttgtctcaggttatgttgctagtaaatgacaagcaaggcattgaacccatgtaacctggcccatcatctggagcctggtcacatcaactttcctctgtcctcctattgctttctattgggtttatgaatcatcctggctatgcttatttttgaggtttatccttagtggtcaggcattgtctcaaacacaaggctaatgtaagtggttctgcttgtgatttcttggttttgttttgttttgttttgttttgttttttgagacagggtttctctatatagctctgactgtcctggaactcattttgtagaccaggctggcctcgaactcagaaattcgcctgcctctgcctcccgagtgctgggattaaaggcgtgcacggccaccacgccctgctatgcttgtgatttcttgtatgtacctggaaaaactgtgtgtcgtccctgccatgctgtcactcacctccatgtggttctcttcaccctttaggccgttactgtggtacctctctgccccatcccatcatatcatttggcaatgccctgacagtgaggtttgtctctgattctgtgtacggttttgacggtttccatgccatctactctgcatcaacatcaggtgagtgggagggattagcattaacagatgacctcagggttagcagacatgtggtagaagtctttggcttgttatttggggctcttttcatttaacgttgggagctaattcttgaaatttcccctgtaccttctttataattcaatgtctacattctgacaaccatgaggtatagaagtgagaaaaatcatctgtaaacctggccatctcttagctaaaccttatttgtctgggagacctgttctctactgtcacagcaatgtaaacatgaagtgctaaggcactccatgactgccagtttgatagaagctcttatggatgtacagcctcatggttgttcttgtcttgggagcttgatggtggggtcaggtaggtctggctgtgcatgtccactgtgcagtgaggcatctaagcaggaaaggaaaggagtgccatccagccctgcggctcttggccaggtggggcaattacagccaatgtgtagaaagatgaagaacagtgtgtttcactaccctccgcagagggaaaagctgtagagtttctttttacatggcaaccagagaaaattaccttctcttccaggctagggttgaagagcatactggacaagattaaaaacaagtcttcctaaagttctagttcacatggagaaagccttttagaaaggggtcccctccagctcaccatactgtggagttcttgggtttctgttttcagactcctccctctgttactgtgcgtgacacagttgcttcttcatatggaatggacgcgctttgtccttcattttagatactggctctaatgcccttccacttgtgtcttgtggtgtcttccattttgtctttgctctgaaaccccctttgtttcttttgactttcagcttgtggtggaaccttctacacgggcgatggcatcttcaatagccctggctacccagaagactaccattctaatacagaatgtgtctggaacattgccagctcccctggaaatcacctgcagctgtcttttctgtaagtccttgtcaggcatgccctgtctcagtgtgggtaaatctgcagggaggaagcactgttactgacagaatggttgaccagcagcctgtgtctgagctatcagcagagagaacttgtgggagccttaggaaggctttcctcaatttctttggtttcatttgtagcttcagttgtataaagcattaagaatctttcaacaatattctttctttcaactgagaggagaggagagagagagagagaaggaggaggaggaggaggaggaggaggaggaggaggaggaggaggaggaggaggaggaaacacctgacttcatttggccttctttatccacacactatattcctattctaacccacccttcctttcttatcagagaagtgatcttggataggatttttttatttagtttcttaaattagccataattagtgatttgtaaaaactactttcaattttctcattgaatcttgacacttttggaacatggactatggattggagtgaatgggagatcttgtatgttccaagtagacctaggttagaccaaacagccataatagtatttcccagaagtagatgtaatggggagatgttatatgacatctgattgtttcattcctcagtagagaggttccaatgagcaaccacacctttaatcccaacactcagaggcagaggcagacagatctctttgaatctgaggctgacctggtctatacagtacacttcaggacagccaggactccatagaaagaccctgtctcaaaacgaataaataaataaaaagagacagacagatagatggctagatagtgagcaaagatatttactgaagacatgttagcatttaagttaccatgttgagttcaaaatcatgtgccatactatattacattattggggtcaggttgaaatcattaatactttgttgcttttttctttttcacatgtcctcagtgtgtagcccacaatgacctaaaacttaggatccttgcctttccatgcagagatagaaggcaatgatcctcctgcctttccttgctgttcagagacaacaggcatgcatgccaatgcctggctattaagtgcctctatgttgagaaaacattctttgctggtttttccttgaagacatgcctaattgtgctataagaactaattaagaatgagacaagctcaaacatttcaagttgctttcttgaatccatcagtcagcccatgcctcctcagggtgcaagtgacataagtaaaagccgtcttcctgtacctgaacgacaatgccagtttaaactgccatgtgggaatgtttgggagttgttttcactgaaatcatgacatttcttatgtaataagaaattgtacaactgtgcatctagtaatcgctccatgatgtgtatttctattcaacacatatttagcagcaccctgagcacataaagaatgcatgcttctttcctgggggtgccttatagacagtgatgagaaaagggttctcctgtcttagtgttgaaggtcaaggtccactatgtaacttgttgtagctcccaacttgccaagaatttcaatctcttttcttggtctttttcctcctacctcgaacacatttatgttgtacacctctctgatgttcagtggttccaggaactaggataggtcctgggaatatttagtacatctatgctctctgttctttgtagcagtgagtttgggctacaccactttggctcctggcaggctgagcacacccacccaggaactcttggattctctaatggaagacacacacacacacacacacacacacaccataccagttaattttaaaatgccttggctgggtactcaaaggctgggtactcctgccaccccaggtccaaatggggaaatggccagtggccactcaactgaattctcacatggctagttggctttctctcctgtgtcccatccttcttccccaactcatggcaatctcccttttctctctaccctgcccccgtgcccaagcccaagcaactctaagggtcctgccccatcttcctttgcccagcctttggccgctggcatctttattgatagatcaaaaaaaaaaaattggagacaaagacctttagcatttggacacacagattcccaattgaatcaaaacattcgaaccaatctccaacagttcttgacaaatttgttgataaatcaactttaagaagtcattgaattgaaagctcaaaagacacattttatccttagagagacaacaataaacttgaagggcctctgttaggattaaacatactaaattttaaaatacatagcccaaggccatgataaagaatgttcagtgaaggatgcttcattctttgttatgactgaagactcctctctggtgttttaggaaccacattttatggcccacagtaggctagagcacaggtacttatcttggttttcaacttgaaacaccagaacaacagcagaaagttatcgtgtgaatttatctatagggcgctgtcttgattagtaactgctgtgggcagcccagcccagtgtggttctgaactgtagaagaatcgcaggtgaatgccagcctgggcataaggctgtaagcagtgctccttggtctttgctttagttccttcctccagattcctgcctagagcccctgccagatctgtccatatgagggactgtaacctattaaccaaataaactctttccttgtcaagttactcttgataatggtgtctatcacagcaacagaaagtaaacaaggacagaaaggggcatccatttcacaagctgacagacattaagtcctaattactaaataggaaaatcttggtgactcagttgttcccttgttcacctatatgctgtttctttggcctttgtgttccttgtttgagtctttttttgttaaggtggcttttgaagaatgcaagttgcttttgctgtgtgtgttaatgtgaataagaaaggcaaggcccagagttatttctgccctgatctaaattacattcagatgtgtactagaacttgtgcctggggtgtgtgagagacatatgaaccacatcaagttctcaagcatagggtttagattatgaatgctgtggtgaaactgagtggggagggaaaaaatggataaattatagttgaatttgcaatgaaaaggaaagaggagaaataaaatttatataaagcagatattcaaagggctgaacagaaactgtacttcatgccagcagaggggtctgagaaaatggctggttctggtagcaggacaaaaatgcgataactagaaacagaaagggtattatttttattacacattatatttttactgacagatctttgccaaaatgtagatttgcttataaaacaaagactgctaagaataaagctttcataagaacttttgtttggcttttataagtttctccactgtaattcctgataggaagccattccggctgtttactcctggaagacagtccaatagttaggagagaccttccctgtgtaatctccgagattattggtcagaattttaaggaacattcagatcacctgagttttgctaaatttcataccctgatttagttgctatttagggatagattctcccgctaacccccctgaatatacaattattacctattcttttactgaaaatacattttcatataatatattctcattgcagtttccatgcctccacttccttcccccttcctcccccaaccaaatctacactttcccctctcattagaatataatcatctaaaataataactattattataaaagaaaatgatacaaaacacaatcaagaataacacaaaacaaaacagaaaaacaaagaaagaagaagaatcacaagaaacacagagtctgaggcagggtcacacatacagaaagcccataaaagcaaaattaaaagctataatatacaaggggaaaactctgtaagggaaaggggaaaaatgcccaggaaagcaggtggggttcagattctttatgtcaaatgaactcccacgtggtgctgggttgctgggttactgggtcacactgcatgcttctatagaatgctttcagagtaaggccctggattcaccctctgagatgagagaagagtcacctgtctcttttctcaaaagcagaataaaataacttcggtatgtttcacattgtgggtttattccactaaatataataaaattgatcctgaattatactgtttctcttataggtagtattgttttgcattttcttatttcaaagttccaaaggtagtatgttttgtagcaagagtttatatttcttatatttgagctcatatatgaaaaatgtaaattgatttcagcatataaagaaatagagtttattttccttactccagaaggatatccaaatattgtagtaggaacaggataatcttatatttgttccatgtttgctttgtaactgtttgtttgtttccaaattagatccttccagttggagaactctctaaactgtaacaaggattttgtggaaatccgagaaggaaatgccacgggccacttgatgggacgatactgtggaaactccctccctggcaattattcatcaatcgagggacataatctgtgggtcagatttgtctctgatggctcaggcactggaatgggcttccaggccagattcaaaaatagtaagatggtttgtttccataagggtttctagaatgtatcctacaaactaggaataatgataaaagttttagttatatattaactaagaagaattctacactctaccttcttttcaatataccagaaaaaattaattattaattatttatggatagatcactgatggcaaagaaaagtgtgcttgatgctttgagtattctttttaggctctagtttctacctgctattaatgatattgtacaaactggccttttaatatacttcaggcagttatatcaaacatgtttatttggtcttttaaatacattcttcaaacttagacctttagaattattttaggattgtcttaatcattcagataaaacctgggcaaatgcagataaaatattaattatttttattctttaacaagtttttcatgattggcaatactcagtgttgattctcatatagaattaaaaaatattttatttcataaacaaagaaaatttagtaatcataattaagatatgaaatggcaccctactccccaagtcccctggtgtctgggaaatctttttcacatgggaagttgccccatcttttcatagcctgcagccatctaaggagatggaattccattcaagactcatccttgaactaatagtccagaaaaccaaaagcaaagcagtatttcttttagtggtcagaaaagaaatggcagtcaattaaaagctcattctttccaacagtcttgccctttgtgtttgttctcagtttagttttgttttgtttttcattctattaaagaacaattataaataggtctgatttacaattctgttctctgttctagtatttggcaatgataatattgtgggaactcatgggaaaatcgcaactccattctggcctggaaattacccacttaactccaactacagatggacagtaaatgtggattcttctcatattatccatggtagaatcttagagatggacatagaattgacaacaaactgcttttatgacagtttaaaggtaatcttttgtgatggagatgtttttatactttgatggatactactggcaaaaataagttggaattcatacctactcaagtaaataacagacataggtgatggtcctaccatctcattactgttgtctcgttgtcatctgtacaaaagtaatccttgtattgggtttgttattttctattttatatcaaattagttttataataattgtgctactgactctgtctgagcatgcctatttgttctagttatgtgtttattctgtcttctatcctgttatcctgtttcttcttttatttgcttgtcttgctttgctactttcgttgaagcaacatctagtagaaacagtttaagcttatcccctactaggtttcaaataaatgagactcagactatggttattttattttgctttgacaattattgggggctaacccctaatctattcttcttaactgcagcttgggtaccttcccagcagtataccccaaatacttgttgtttctcctggccatgtgctcatggtccatctcccctcatggtggcttcctcattttcttccattcttcctctttcctctctggcctctcctcattccatcaagtaactcaccttcctctagtccctccagtaattggctatagccaattttatgtaaccaatagtattaaattaagggacaaggttcccacaatcaaagcttgtaaatgtgagaactcactcataggcctagactttggggtacaaaatttagcattacaatatatagcaagagatcaaacctcaacagcaacccgggcattttaataagagaaatctttcctatagatggaagtcccagtgttagggtggagagggaggaaggaggaggtgtagtgcatactcagaatcaacagacttaacaagagagaaagccatccagttgttctaatgtttcagccttaaaacctgaaagagtgatataaaaataagaaaatatgaatagaagaaattatggtggcctttgcctccatacattggctactctgtgaattccagaaaacactatcatatcccctaaagccataatccaatcactcttcttggcatctcactgctcaaagcagaacccagtgactgactccatgatgctcaataggtgtggaaatacttgtaacataatttgaaagaaataagcttaataaagaattttatggttgttacaatggaattgcttacagttatttgaaaactatcataatatctatctctaaataggtatgatagtattttaaggcagatggaagagatttactaagtattttgagtgtccagagccctgccaactgtggtcctttccctgttatttgctttcttctctacaatcgtttgtacttccccacccacagatttgactataaaccaccaagtcagctatatagtctacactgatgttcattagaataatcccacaacaaagctatatgaaacaccttaaaatagttataataatatgttcaaacgtaactttttgttttaaacaaaaagaattttcctgatattctttctactttggtaaaatcataaaatacaaaccattctttaaattttgcttctcatgaagaaagtgtgtgtagttgcctaatgatgatgttgtattgtgctttttttttcatgcagatttatgatgggtttgacattcattcccgtctgattggcacttactgtggtacccaaagagaatcctttagctccagcagaaactctctgacattccagttttcttctgactcttccaagtcaggaaggggattccttctggagtggtttgcagtagatgtttctaatgtaaccctgcccaccattgctccaggtgtgtttggcaatatagtggaatttttttctaggaatggtgtgtgatatgttgtgttgtgttgtgtatgtttgtgcacttgcaggccagaagagagattgagtttcctgaagatcgaggtggttgtgagctgcatgatgtagatattgggaatagaactagggtctcttggaagagcaggacatgcttttaactgtgtattattctcaatcccaatgtgcagcccctttgaagcacttctaggacaagtgcttaaagacgttgtttttcatttcacaggagcttgtggagggtatatggtgacaggagacacccctgtcttttttttctccccgggttggcctggaccatatggtaatggtgctgactgtatatggataatttatgctcctgattctactgtggaactcaacattctctccatggacattgaagctcagctatcttgttcctatgacaagctgatcataaaagatggtaagaaacattgtagaaaccactccttaaactctgaaattactgttttatttttatactagctccatacattttgtatagaatttcatagatactataaccaagaaagccatcaaatagaataaatagctacaatgtttagagaatatagggcgagtattaaattttacctataccaaaatgtcagggattctacagagaaattctacagagaaaaaagaaggccctttgagtgagataagtctggaattccagactgtgctaaatttttgatacaatgaaaatagtcattgatatttgtacctatagctttaagatacaagtgaaagaccaaaaagtatccaaggcaggtaatatatccatttctcattatcccgagaatctgtggatagaatagatagaactgagaatgttgtagtgtttctatacaatgaaaaaggggcatgaatgagactatacaatataggtacaattgcccttcacactctgtatgggttaagtacaaaagggcaccaggaaggccacatcctccatatcagtgtttctcagtggatcccagaacagcaatgttagcatcacctgaaaatttgatgtgaatggagattttttttttaaaaaaagcaaagctgtttcactataatattcaagaagttgctttcttaggatcccatctctatcaaaactcccagcaagaaacatcactttgtagagactcatctccccatctgtagaaggcactaagaagccctcaatcaatcatgccaacatgatgtgatcataaaccttttgtcctgtgaacaactagctttcagctcatgtacagaatacctccccttttcaagacatccctggagacactaaattttatttttatagtgtaattcaatggatgcatcctgttacacacaattctgagtgtccacaatagagtggaaatcatttagaaatcttcaggagggagtggaatcaatggagtagcttgcttgttctctaaaatcaccatctactgacttgccttttgtccttttagtaaattgccttggaaggctggactctgaggtgtattccctttcttctaaatgactttcacagcctgtcttatcatctgagaaagagataaatgctgctcttggggctcctcctcctcctcctccagcgtccttttgagtatctgaaaaagcagtaaatgtaagattctaacaaaagtctgagacttttaaagacagataattcagaatcctttcagccttattttatttatttaagtatacacagctgacacattttatccattttcttgctcatagggcaagttgaaagagctcagaaattgtgccttgtgccaaaacaacaaaagcattttatattgctagggtgacaagtggatatgggtcctttttatttgcagccatgaatagatggcttatagcttccttccttctacatctcttggattgttcaaaaaagcctgggttgagtgcttctgtcaattgctgggtgttttgaaaattttgtccactcacattatgttaaaattctttgaaattaaaatttactcattattttatttatttagattttttgacccacttgttattttgcttctgattagtagacatgcatggcattctgaagcaaatatctaaagttcattgaccacaaaacagtcagacagatgtcatgtgcaattggtcagtcctcataggtccttggcacttggccatagtgtggctgtgaccattcttgagcagcccaggaagcagcaatcttgggaaatatgtcagagccagcctcccatctaggattccttttttaattatttaaaaccaaataattcttttcagtcaatacatatcaaattttatatactacacatactgccgagatctcatagaactatcctgagcatagatgtatttttgaaagaagagaaagtaagagaaaagaagagaaagaataaatggagggagaaaaggaagaagaacagagaggcaggtggaaattatttgtgaagtcagtaactctggactgggatatagctcacttcataggttacttacaatccccatactcaggaagggtcaaaagttccaggcatcctctgctacttggtgtgttcacagtgagcctggaatactcaagaccttgtttcaaaagcaaaagtaaatcaatcagcaatttcttttttgtagtcctgtcagacatatcatcatgtacatcatgtagaggaagtgtggagtatctagagttaatctaccagggttacagtcattgttgacttctgtgcccttgaatatgataaccaaacttgtatccctctcaagattctttttctaagtattataataatacctaccctacaatgttttgtggaaaaaaaaaacaattagaaaccaagtgtaaggcacatatgagggttaataggttttcataatcttagtacctgtttcacatctcctagacagttgggctagcctgaggaatcatcatcctgtcttctagaccagatactaatggttaccagacttcctaaccctttagatatggcttctaggtctaaaattgccatattaaatatttggaaatttaccagagttaagtttggagactagaaagatgagcgaagaatgaactattttataagcattgagttatataacaattaaggaatgaactaaacaagcaatcatatagggctaagcattgcttcacccaacaggttggagtagtacctagaaaataaataaaattaataggtcaagcccaggcttgctgagaagtagaacacgcattgatatgaatgaaccaaaattttgtagcttttataagtacagaaaaagtcatcaaaaatactatatgaaatgtacattaaaatagtgtaacaaagtcaacaagtgagaaaataatttaagaaataaatttcatttataaaaaagcatgagtttacagggatggaagatacctaaattaataaagtgcctgcaactataaacacctaagatctcagtagccctgtaaagaagctgggtgcagtggtgcaacactgtaattctgaagaagctgggtgcagtggtgtagcactgtaatcctgaagaagctgggtgcagtggtgcaacactgtaattctgaagaagctgggtgcagtggtgcaacactgtaatcctgaagaagctgggtgcagtggtgtagcactgtaatcctgaagaagctgggtgcagtggtgtaacactgtaatcctgaagaagctgggtgcagtggtgtagcactgtaattctgaagaagctgggtgcagtggtgtaacactgtaatcctgaagaagctgggtgcagtggtgcaacactgtaatcctgaagaagctgggtgcagaggtgtagcactgtaatcctgaagaagctgggtgcagtggtgtagcactgtaatcctgaagaagctgggtgcagtggtgcaacactgtaattctgaagaagctgggtgcagtggtgtagcactgtaatcctgaagaagctgggtgcagtggtgcaacactgtaattctgaagaagctgggtgcagtggtgcaacactgtaattctgaagaagctgggtgcagcggtgtagcactgtaatcctgaagaagctgggtgcagtggtgtaacactgtaatcctgaagaagctgggtgcagtggtgtagcactgtaatcctgaagaagctgggtgtagtggtgtagcactgtaatcctgaaaaagctgggtgcactggtgtaacactgtaatcctgaagaagctgggtgcagaggtgtagcactgtaatcctgaagaagctgggtgcagtgatgtagcactgtaatcctggagctgagcaagcagaggcggctggctctctgggcaaccagagaccaagtcactgggaaaagacttggtctctaaaggcaaagtgaactgttcttcctgaggaagaactatgcgcacacatgcatgcacacctatatacaaaaaaacttaaataaatagatacacacacacacacacagagaaggaaaagtgcacatatacagatgtaagacactgaagaattctgttccaagcttcttgaaaaacttcatatttataactgccagggtattgataattacatggaaaacagaaactgacttgtcagtattcaatgaatgtgtgcgcacatgcacgtgtttgtgtgtgtgtgcatctgtgtgtgtgtcatgaaaagagcatgtttcctcttgtctcaaattctatcttattttcaataagtttgaattatgtcaattttctgcctttagaagaaaacaagtatttccccaggcaaggatcctgagtctgctataatcccttttattctgctcagcttctgcctgaaatagctgatgtcccttggtgtcccttcctggggctacacttgctgggatcatcttttctcagcttccatgtaacagttgtcagtttacaacacaacaaaacaatatttaaaaagaaccccctgagtgaggaaacagtcatacaaagcttttggaccaccaggtgaatgatctctgattgtgagctcagagactgagccagcctctctctccttcagatatctgaccttcagccatcatagtaactgagatcagagcctctaacctccactcacttaaacatggtcttgatccctttccagcccatcattctgagatttagtgccaggaagacctggcaggaagttttagaaagacaggaagacttgcctcaaagatttttattgaaagggcaggcagaccatggcaagctggagccagaatgacttaaagctggctgctcctcttgttgagaacactattatctcctaggaacgtgtgtggtctgagaaaaatatgtgagcagttttggcttggctgaaaatgatggtggaatagattcttaagaccatctttttacgctgacatttcccttctttggtcacaggagacagtagattatcccagcagctggctgttctgtgtggcagaagtgttcccggacccatccgctcaactggagaatacatgtacatccgcttcacatcagatggcagtgtcaccggagcaggcttcaacgcctcctttcaaaagagtaacatggccaagcatttgcccttttattccctcctccctcccctcccccatctccctccttcatctcccttttcctcctctcccctactcacttttctctccattatttctgtcctcttctttgtaaaaaatgtctccctctgccctctttctccttcccttccctttcccccttctatcttctccagatttctcttctccctacttcttcctcttttgatcctcccctcccctcctttccccttcctgtctctccttctattccctctccttcccactctggtgttctcttttttactttctccctaatcactcacctcatcttctcatatcaaggcacaaagtataaatcaaaagacacaggcacctgctatgacatggagcccgctactaagtcctcacacaaaccagagttatctatttgtacaagagcatctcttacactgagatatctgagtggtacctctcacttccgtgagaggtgtgctcatggtagacataagaaagaaacagttctttgagaataacttttaccctagctaagggctaggcctagaagataatactcatagtttccatcaaagaaactatggatacatgctgtctccagtttaagaaataaccagtaagtaatgatacagggtacaccttcatgaaggcctcagatgaaattaatcgacttgagtgtgatttgctcttgaaatagagacttgtttagtcagaaaatgtgtgttgtatatgaaatgctctaatgcataatagcattgagatttttcaaaacttgacagcatgtgaagtctaataacttcaaaggtaagctagattgacattaaagaaattgtctgtggaattttgagaaacagtcatgtataaataacttaattttactgtgggttcttgacctaatactgcagttaatctagcatttccttcccagtatatatgtagcaatcaaaggaaaatgatctaccttatactcagtggaagcaggctgtgcaggggttatgagagtgggcttggaattagagctgaaacaaatgtctgtctctgcagtttgacttgtgtgaagtttctgctacaagctgcctagtatctgacaatgataacataaggcctgctttatcattccctttcttcaactcatgatatcaaatatagaaatagcccatcaaatatagatgacaaataggcagagagataaatggtgataggtgtgatagatagatagatagatagatagatagatagatagatggatagatagatagatataggtaaatggaaagataggtatagataggtgataggtaaatggaaagaaagaaagaaagaaagaaagaaagaaagaaagaaagaaagaaagaaagaaagaaagaggtacatggatatatagctatatagttatagatagatgataggtagatagatagacagatagatagaagatagatagatagatagatagatagatagatagatagatagatagacagacagacacacaggtgacctgcaaagccttcccattcttacacagtatgtaggtcctctctgctccctacctaacctcaccaagctactttctgagttgctcaggctacctcatccattccgagtcccagcgatgttcctctccccatcctctcaagtcttcatacagttttctggactgagcagttttcttccccatgctcacccagtctgagcccttttcccatccagatctctactcaggtctaaccccgccccccaacttcccaagccgcagaatattactccttcatttttatttattggattcacagctttttcacatagtagacatgcgtttttaacatgtcttctgcctctgtaaagtcagcctttgtgaaagtaagtgctctttcctctgtggctcagatcttaagcaccacaccacgccgtgagtgtccaacagtgtgtactgcttcagtggttgggcctctaatcatttctttcaaatttctcatctcctgcttacattttgagaagtcccctatttgggggttggggaaaagaaaagaatagaaacctcattgtcaatattatttaaatagcttacctttctttcttcctggtaaggctgtggtggatatttgcatgcagaccgagggatcattacatcccccaagtacccagacaactaccttcccaatctcaactgctcctggcacgttctggtccagagtggtctgaccatcgccgtccattttgagcagcctttccagattcaaaacagagactcttcttgcagccagggggactacttggtggtaggtcctgcgtgttattctttgtagttactatttctacagatttaatctaaaatttttagtatgaaaattgataggaattttaatcctattttacagcataaaggatgttatacaattttaatgtctttctagctaagaaatggaccagataaccactctccaccattgggaccctctggaggaaatggtcgtttctgtggaatttatactccatcaactctcttcacctcagacaatgaaatgtttattcagttcatctctgataatagtaacggtggacaaggatttaagatcagatatgaggcaaagagtttaggtaagcacttaccctgagaattatatctgtattttccctgagattgtttggcgctgggattttagaaaacaaatacaaagctttctgaggtaaaagtcacaggtgtgaagtacagctgcctgtgatctaggacttagagcacactttggacaacagctattcagcatggggcttcttaaagaatgtattattctttctactttaaaggttagcagaatgaggctttgaggtttccatgttactgtttgtttcgttttctagttaatggtgaaagtgaattttccatcggtagcaaatgaactgatttaaaagggccccggagtcctttagtttttccatgaggaaatgtctaagttaaacctagtgacagtagcatggtaagggctgggactgctctgtacagcactgctgcgtttttgctttatagggaacactaacctatggtcctattattacttatttaattattgctcatctcattatatttcagtggcaaactttatgcaaagagccttacttatgtttaattatgattgtatttgattctattgcagtgatttgttttttttttttttgtggcatttactttctaacattatttaactaaaagtcagcggagagtaagcagcagaactaaatctctacttgttcccccaaattcaatattatgtgaccttaatcccagattctcgaatatgcatcaaaaggtatattgatcttagtaaagctgtggaggtttgctgttgttgccattgctcctgctgctgttgtttgaaatcaggtccgctatagcccaaggtagcctggaatgcactgtgtagttgaaggtgaccttgagtcccttatcctcctgttttggcatcccaaacgctggaattctaagtatgtccctccatgcccaacggaaaccgtgttataatatatatgatctcaaatgtgagagaattcagaatgtcatttcttcacctggaaaaaggaaacaaaaacctctattaatcaattattccccaaaccacttattggcttgagcaaggcccaagataagcagtgtgtttagtcacctcttagtgcattgaactcaggccctcaggagctgttagcagctctgagggcagctgtctgtgccactgatggagattggcaacttctctggcatccctgtcctcatgctggcatccacagtgactttgaacaggctggtttgccctccttcaagacccactttcctactttgttaatgcctggatcaatcttaactcagtgatagttcagatgtacctaagtatattttctttttagttcctttctaggcccaccagtcatgcatggccactatcatctctctgtcttttctcacacatatgactacccttaatattaaaatcaaacaaaggttttttgattttataagctatcttagggcagccataagcaatatgattgtgcttatctcttctttcttgctaagcaagacttctccctggatctcttcctttggtatctacctcataccatttccatgtcttcaattatcttctgagtgaatagctcttggcatcacttgctgagctttataccatatttctttctgactatagctgattgagatttctgtggtcctgtgctagatgtcttctattctattggcttgttaattagttaggtaaacatttataaagaactttatactacacccactaccttcttttttaaaaaaattttattaggtattttcttcatttacatttccagtgctatcccaaaagtcccccataccctccccccccaactcccctacccacccactcccacttcttggccctggcattcccctgtactggggaatataaagtttgcacgaccaatgagcctcataatcagcctccaaacgctgacaccattgcatacactagcaagattttgctgacaggaccctgatatagctgtctcttgtgagactatgccggggcctagcaaaaacagaagtggatgctcacagtcagctattggatgggttacacggcccccaatggaggagctagagaaagcacccactaccttctttaaaagcatccctctggacatcatctatctctcttatctatctatctatctctctatctctctatctatctatctatctatctatctatctatctatctatctatctctaatacctatcatctatctgtctgtctatctctatctctcttacctctgtcttattcattctgtcttgttcattctctctttctcctggtctgtctgtctgtctgcctgtctgtctctatatctctctcatgaccctactccgagactgccttttgctctattccctcccccaataaacctcttgccttagatctgttgtgtggcatggtagctgcacaccttggccccagatcctttctgactttaccccgacaaacacagtaacactatcatgaagcttttgtagtaccagcacaaaagaaagtcataggtcaaggcacttttcaaatgcattgctggacacaataggcaaatagtttataataaagcaaggacatctctattggcctttgatgctaatgatgacattcttagccattgggtttaaagctagggatctattagtatatatcacaaggatttacctaatagtcatgaaaatggatgctagatcaaacacattggaacaacaaaggactattaaggaaagctaaatatagcccaagactgcaacaatcctttctataatcctgaaagttctaatcagttaattctccttgtagaacatcagctcacatgttcatgtgttgctgaaatatgctttgtacaatcatcattttgttagctttaatgaaaaaaaatccaccggaatagataatttggatatcagcatggtgctaagtgtttataatcctagctcatgggaggtagctgtaagaggattaacaattcaaggtagcctcaataacatagaccagtgaggctcatccaaggctgcctcaaaaacaaacaaacaaacaaacaaacaaacaaacaaacaggctggagagatgggtagtggttaagaaaattagctacactggctgcttttcgagacccaggtttaattcctagcactcatttggcagctcacatctgtctataactccatttctaagggattggatgctttcttctgacctcaaatggcactagacatgcatgtggtgcacagacatacatgtaggcaaaacactcatacaagtaaggtaaaagtaaaattaagttaaaaagtaaaataaaattaaaaacaaacaagcaaacaacactcccctcctacacacacattttaaagcgaagcacctgacctaacaaaaggcagaacagatttatttgacagaataaaaaaggacatacatggtagctccttttcttaggaaattcaggatttatttgcttaaaaagaacatgaagataattctgatgaaaggaagttgggagggaaaatacagaaaaagtgatggtagagactgtggtagctatgtcctcattcaccagactgcagattgatttgattgtttcttgacagcctgcgggggtactatctacatccatgatgctaactctgatggatacgtgacctcccccaactaccctgccaattatccccagcatgctgaatgcatttggatcttagaggcaccttcagggagaagcatacagctccaatttgaagatcaattcaatattgaagaaacacccaagtaggtcacctccattttaatgttcctccaacccaaagttaatatttttttaactgtcatgtctcaagacagtttatttcctctctgctcagcagtacctgctgcccagaaaaatgtagggacaaagagatgagttaatgcctgaagcctcaaagccttgcctgatagctgttgccaccagctacatagattatgtgtgcaggtttctgtcttcaccctcaacacatcctccaagaaacactgggagtgatggtttgagatttatgtcatttgttcttcctctcacaggaaaaatacaatctctcttagatgagagtattttcggtctagctgcatattccgtgtcacagatgataaatgtatctgcttaacaaataagaattcgtgtggtggggccatagaggccaccagtgcccccaaacaggactgaagcaatcactctgcaatgtcccagtcttggttgcatcaggattcttgaaagatcatgattcacacagcatgtgtgactgtgctgaaaaccaaggaaactacatagtctgtgaaaccaaagcaaaactaaaagccgaagctcacatctatattatcttctttatcacttgtctgaaacatccctgtatttgtgtgaatagatgatggcacagcagagcttctgctcagcaggttttgataccaaatatgatatgataccaaataagtatggatggtctggttcaacttcattaggaaacattagtaaaggcttgtcctctaatagtcacagtcatggaacttctaagagaggttgatctttcgcctatggagtatattcaattatcatgtctgacaaattctactctagctaaatccatagttcatctgaaatgacttttatgtttctaaggcaaacacagaacaaggaaggaactatctccaaaggtaaacgctgtctgcatcagtcattcatggatagatgtattgtcattagacaaatgtatgacatttaaaaacacctggaagctttatgagactcactcatgttctcttatcatccagaaatgataattaagtaatgtccttaaagaaagaagtcttttattaacaaaataagtaaaaaaaagaacagtttttaaaagtttgatcatttctttctgctagctgttctgcaagctatcttgagttgcgtgatggagccaactcaaatgcacctgtgctttccaaattgtgtgggcacactttgcctcgaaactgggtatcctcaagaggactaatgtacttgaaatttcatactgaaggtggttccggctacatggggttcaaggctaagtattctataggtaatacatatatttttttaatcaggaaagaagtgattcaggggagcactacaggtttgactaggggagcactacaggtttgactaggggagcactacaggtttgactacaccataccttccatctgcctactttaagattaggacgaagaatgccatgtattaacgcacaaagttgctaccaattttgttattttatattatgctaaatgcaatttttactaaaacattagtattgtatattgtccatttgtgtataaaagtattttcagttgtatcaattttttgtttcattctcttaccatgaaataattacaatatacttacaaatgataaaattccttagtgatacaacaactcatttgagtaacgacttggaatattgtacagcatccatagaatggtcagaccttttccttctgaatctccaatgccaagccagtcattcaatgaaaagcacattgttcccttggagtttgattcctttattttaaaaaaaatgagctataaacagataatattgaagatttgctccaagtatataataccacatattgcatataatttagtgtctcatgggtctgaacactctcaaaacaaatatacaaatcagcaaaaattcagaaagtctagtttaacagtatgtaatctatacagtttaccttttagccaaagttaaattgtacataggttaatctagctatcacatccatatgataaacaataatgtaatagtattttcaagccctaatagagtatttactaaaatgcaatgtgtacttagtagttaatctagagtggtagatatttgcttttgccagccaaccactgtgcccactccagaggagtgtggaccgtgtttgggatcatcatcagaagctaccaagccttcccattctgccagttgcttcctggatggaatttacatacaagcaatagctcttacatcctgcccctagagaatgaatgtggcattacagaatatgacattccacagttgtcttccatttcccattactagataggcttacggtatctttctttccacccataacagattccaaataattaggaaaactttaatcaacattttcagattgtacaacttctttcaatattcactaggctcctaaaagttttaaattatcctggattaatcagaaaaagaattcataatagaatataatttgtgtatgtgtgtgtgtttgtgtatgttgtagtttcgtgcggaggaactgtctcaggggacagtggggtcatcgagagcgttggttacccaacccgtctatatgcaaacaacgtgttttgtcagtggcatatccaaggcctcccaggacactatctcactatccgttttgaagattttaaccttcagagctcccctggttgtgcaaaagactttgtggagatctgggagaatcatacctctggtcagtgaagtactgctttctttttttttttttcattttttttattaggtatttagctcatttacatttccaatgctataccaaaagtcccccatacctccccctactcccctacccacccactccccctttttggccctggcattcccctgtactggggcatataaagtttgcaagtccaatggacctctctttgcagtgatggccgactaggccatcttttgatacatatgcagctagagacaagaggtggaacaacaatatgaactaagaaatactgctttctttgtgggtgtttacttcttaatttatccagtctcagaagcatcttcacttctgataaaggcaaaagtttgactgatatctttgaaatgtagatttcatgggctctgggcaagatcagtagttgttctctttatgattctagtggatcacaatggatgctcagtatcccagtagccattctatggccatcttggagagcacactgaaagagccttgcattgagaaggcatcctcttcctatggagacctctcagtgccacatgtggatactggaggagcctcctgaaacataagtagagggaagggcagtggatcccatgttacagtagaagaggcacttggatcatttctttaaccatgtgagcaagccttcctcaactggctgagatagatttaccctaattggttcccctatttatacatctgcatatatttgaatatattgatgtttgttcatgattttctcagcagtggttgccatttcttcattgacaaaagatggcctcataaatttggttttctttgtccatgcaaaacagtttaagtaaagattaacaaaaaatcaatcacccaggcatatgcataactaattatttgactcttacaggtattttgctggggagatactgtggaaactccattcctagcagtgttgacacttctagcaatgttgcttcaatcaggtttgtcacagatggctctgtcactgactcaggatttaggctgcaatttaagtccagcagagaaggtaagttcaatgacttgttagaagtggtactgatctgttacacaggatatacactatgcatggtactctcatggcaatgatgtgaaaaagaaaatgtgatgctctcttcttggctcttacaagataaaaggcaatgctaataaacactcaccaactaatgaaaagttgccactcggaataaaagccaaaaggaagtaacatgtatcatgggagctgcagagagccttgcctgcaaggcccattttgaaaacaatagtccattataatgccctagagctatcaagaactcacattcctaaatgccctgacagaccagggtcaaataaaaatcttgtctaaaatacatagtaatgattttagttttcctaagtttgctatgtttttttgtcttttatatatattctgggccctgataattatttaaatgttgccagtgaactgttttctatggaagaaaatgttaaatattgatagagacaagagttgaataccaatatagatataagaagtcaagattgaatatagatgagcactctcatacatgtggaaacaaaaattatgaccaataactttttctagatgggtcattaaaaactaattttaaatgcagaaagatattttgactaaatgcttttctttctgtctttcagtgtgtggtggggatttacatggccctactggcacatttacttctcccaactacccaaacccaaatcctcatcccaggatctgtgagtggacgatcaatgtacacgaaggaaggcagattatcctcacttttaccaatttgaggctaagtacccagcaatcctgcaacactgagcacctcattgtaagtgttccctggaggctgggctctgtgttctattgagtatgggatgtgttcacacagacgtggtagtatgaaaactcagtcaaactattaccacctatgcaaattcacacaaattcagagtattttagacagaaggaaatcaccataaacttctttcagagactgacatcaataattgcatgcacccaggttatatgttggtttagttttcagaacaaagcattattttttatatttatatatttattatttattggttattttattatttacatttcaaatgtcatcccctttctcagtttcccctccaaaaactccctctcccatatcccctcccccttgcttctatgagggtgctcccccacccctacctcctctctgctcctgtgacccagccaccctaatctctcttctgtcccttgattatgtgcagtgctccaacatcatgccttaactgctgatatgacctccatctagactgtccctcccaagatggctgcctagttatcttttcatgtcccttagacctccactctagtgactgacccccaccacctcattataggaccctaaatgaagcaagccccccttgacctgttccttcatgtgttgtcatttcacagtacttcacaccagcttactgagagcgagaactagtttcctttggtgaatcctagtggtctatattcttggagataagggtttgatgaatgaattggggaaataacatgattacctttttttaaaaaaaaaagctatttttgttgtcagtttagttgtctgctgctcaatccgaaatcccaaattaatgtttgcaatttattttgacatcccatgacatcccctcatcacttgcaagtacctcaacatggccttatttagctttccgattattgtctcaggtctagtatctgaagtactgaaatgtttcccccagatactcagtatagaaccactgtggttttcttacatttgagagccagagaatgctgggtgatgttcctgttttctcttttcctcctccttcttaatgcaactactctgggactctaatcccttctaagcatttacattattgtttctagctaacatttcctattttgcacctctttagttcgttttgggtctcatctagccatgtcccactataaaaactgagaaattagcttcctcccttgagaagtgcacacagggaattcagagtacacatattctgtccacttccctgtttcagtcacacatgtcacagtttccatgattggtccacttgggtgattgtggaaactacattcaggctaagccaggcagtatgctgtgcccacgtttccatttgctttttcaaataacaataacagttgtactatttttagattctatagatgttagtcacgaatttttctacatatcttccatcaaagacatgcatgtctatttttgtcaccagtatccctgtccatctgcagcaagccatctgggaaccattgttttgggattttcctgccccattgtgtctgtagtctcttcattgcattctggactggccagctggctccatgatgctgtacatttcctttcttagtcaatttcctgttttcactgaggtacatgctcttgtaactctctaaggacacgaatatgtacagcaacctttgagtacctataagatttctgctttactagaatcatttgaatgtacatatttaaactattatagaatcataatttgaagtttcatgtagtttctttcagtttgcatctctatttacattggtctctgaatttcacattggatgtttccttagagtcctggttgttcttcattcacgttttaaaaatctgtgaaaaagctgattgggagctctgtgtacatgcctgagcctggaaactggcatttgtggaagtacctaagacagacctttacttatatttattttcaaatatcatggcttcagatcttttctcacggggaggatgaaactccatcaaggaatcattttgggaattcatttctgtaggaggttgtttaaattccattttttaaatcatttttatgcattggtgtttactttcctcctctacactccaaacaagtgcaggaattagtgtttacccaccctctgtgtacttgaatgcttgtccgaaaagagggaaacaaagcccaagatctacaggcagcatggctgagctctgagcatcctgttacttgctgaacaccacacccagctggactgtgtttgaaattcctacaaacccagcaaccaatctgatggccaagatggaggaaaggaaaggctgcaccacacagcatatggggtcatgagacaaatgtccaaatttgttccacgtcatagcaattcttaaatattgactgccatgtgtctgctcccatcttatgtcttctgaggcttgtagtttctgactacagaagatcttaggagatatgaggtcacactctggttgcttctaaacacagaaagaagtccatacactaactggttgactgcacatggtttactcattacaattctatgctacccctacctaaagatgcagaaagaggcagtagagaccattgttcattgcctccaacacagccttgttgcttataaattcttttgattctgagaacacattacccattcttgtttatagtagcatgaaatatgcattgtcttctcttgctttgccttgtgggaaatttggatccaaattcaattattcctagttcttggattttaacagactgtaaatctttgtagtgtactgtctgcatttggaaaacggagtcctactgaaaaaccaagtaggtaattagcagagtctgggttcgtatctgcacaagaagtgatggggacatttcctgtgttcctgtaactagaaggcattttaaaccagaaaccaccaagcagctgagttcagtcattaattactgtaaatgaaaatgcttgcatccctgggagtacagcatgtcctacttcaaccaagcttttagtgctattatatccaatagtgatccattcaaatcctttttaaaaataggaatatcaatcaccaagtgagttgctatttatttcttagaattgtttctgcattctgaaaagtgttcacaagccttgtgcagaagcactcactcttcactagtcataactcaagcaattaattgtattttgatgccagtaataacacagtttttaaaagccagatgagtatgagcacacaaattggttgtccagcaccaaacagaatgtcctgaaaacatatacaaggaacgttatacagactcaacgagtgatatttaagaatgtatacatacatacatacatacatatatgcatgcaataacaattagtaaagaaaaaggaggccatgaaaatggggagttgggagggctctaagagagggttcacagggccaaagaggaggaagaactgttataattctattataatctcaaatacaaaaagttaagtcaaatgattaagaatgtagaagctttaaatccataaataattaagaaagagccattatagttacacaaaaatagattttttttccttaagttacttttcaaggagcactggctcagtggttaagaacatgtaccaattttgcagaggatggagctaagctcccagtacacacattggacatagcgacaactgttgctccagctccaggtaatcccaatgtctctggcctcctggcctcctggcctccgcaagcacctgtgttgacatgcacatggccataccaagatacgcacaagcacacctaattaaaagcagcaaagtaaaaccacttaacagtacttttcaaggtatttagaatgactacatacacttggaatagcctaatactaacattttcatttcatgtgttacagcttccaaggcacaactaagaaaatccacagagtctgtgaactctgtgaagtataaagaaggctatgccggggcctagcaaacatagaagtggatgctcacagtcagctagtggatgggtcacatggcccccaatggaagagctagagaaagtacccaaagagctaaggggaactgcaaccctataggtggaacaacaatatgaactaaccagtacccaggagctcttgtctctagctgcatatgtatcaaaagatggcctaatcagccatcactggaaagagaggccctttggactaacaaactttatatgccccagtacaggggaacgccagggccaaaaagggggagtgggagggtaggggatcgggggggggtgagtatgggggacttttgggatagaattggaaatgtaaacgaggaaaatacctaatataaaaaataaatttaaaaaaaaaagaaggcacagtggcatgtttacctcagacatagagcagggtctccacttgcaaactgtgcagcagcctctccctgtcacacataagaggaggacatacttccaattttttcatttgctcaacattgattctaaggctgaaaataacactcagtgtggctctgtggcttgtggtcctgggagaggtgtctgtgtaccaagtgactatggtctctttagaaggacatgagtctgggctgagaatgctcatcccctgagggatgttcagtaaggtgggcagcatagctacaagtcaaactatttttctaacaggtattcaatggcattagaaacaactctccccgactacagaaactgtgcagccgtgtgaatgtgaccaatgagttcaaatcttcaggaaacacgatgaaagtgatatttttcactgatggctcccggccatatggaggcttcactgcttcctacacctccagtgaagatgcaggtaatgtaggatgctgcaaactcacctcctctgggtcagactcattcagtatccccataaacactaccccaagcagccaagccttttgttttctctgtagtgatcaaaagtatacccacaatcttcaacacaagagcaacatctaccacaaatagaacatctgtttgggggatacaggatcagggaggaggagaaatcattgtagtttcaggggggaaacccttgcattttgattttttaaaaaaaatatttatttatttatttatttatttattcattcacttatttatttatttatttattgtatatgcatatgctgttgttcgcttcagacacaccagaagagggcattggatcccattacagatggttgtgaaccaccatgtggttattgggagttgacctcaggacctctggaagtgctcttaaccactgagctgtttctccagtcattgacttttatttttttacaacaaaagtttattagattattttctagcacgattccatgtaaagacactgctaggagtgactctgaacccaccctagctgattcattattttgtgttagagaaaacatttatcttctagttaacttattaccaaagattaattaatttcaaacaaaactgaatacacgtcattatttttgttcatctgcttatatgtatattttcagtgaaaataataaaggggttgcatttaatacagattatccccaaattaagcaacatgcagcctggatttaaagtctcctcttccttttagggctgctggtattttctaagggttttatatctcaggaagaatgaaaataaacacatctttacatttttaaaatttattttattggtataacagacatttgttaccatattaaaaatagtgggtttgtcaacactttagtgttacagtatctatttgatgcagataaattgttgaaccaaatgggaaattgttcatgaaaagccactaggacctagcagcagtttgtgtatttttctaaattatgtattaaatgagtaatatgtccagttttggagaaactgatgcacagtcaaaccacagccatcttcaccattccagaagggaaataaaggaactttgtcttgtgtatttttccttcataaacccaaaggcatttctcctatagtttttatgttctactagcctgactacacctagaagagccaatcaacacgtttattctgtcactcattgtgcctcgattgttggagttgtctgttataacatggctcttactgctttttctctgccttttgttgccttagtgtgtggtggaactcttccaagtgtctctggtggaaacttttcttctcctggctataatggaatccgtgattacgcgagaaatctagactgtgaatggactctcagtaatccaaatcgggaaaattcatccataagtatccattttctaggactttccctcgaaagtcatcaagactgtacatttgatgtcctcgagtttcgagtaggttagttcaatgaaataacacgctttctcatttatgtgcatagtcttcttattcttggacaacagcaggagtcaaatggctactatttcagtacagaagatacaaaggagctttgtcagtacaatgctgaaatcctgtgttcccatataggaagcatgacctatgaactatgagtgaagcaggtccttagcaaggaaagcctcctgtctcaggtttcctgtatgggaggttcactcgagtttggttctggagagtctctgtcttatcagtgtgctccactggtcctacgagactaagctcagtgtggtcagactgccagtagttcccagaaccagaaggattcacagaaggtggttcaattctttttaggccttagaagtttaaaaaccctccacagcataccaatgaagagaagcacatggggctatttgggaaattatcctcaaagacatctttcatctttttttcatgatacaaaaggatcaaggcatcactgatgaaccaagcttctcctaagatttaaaaacaaaaacaaaaacacaactctgtgttcatgaacagttgattctagctctttcttacagttcaggcatagttgatctaactctgctgtccccattgtcaccctgttgacataagtatgttcacagaacataagtatgtagacaacagatgaagaaagtattataggtgacctatactgtcaaatgatggttgcattctccttaatccccaattctaaagaaaagaaggatgaaagcaaaatggggcagacagctgtaataatcagtagtggctgcctgtttttattattgtcatttggttattgttaacatcttttattttaggggagttatttttcaaagacctcccataaacttttggatggtagagactaggataaaatacagaggagataaacagtcttaatgtgactatgtaaatgctattaaatagcaagttagaatcatttgtgtctatgcagaaagtaatattttaatatcatatgtagtgtttataatattgtagtgttgtcaggctatgtagcaagtttaagaaatcaaaaaggttaaagaatgtatttcacctctaaaaatttaaagataatttccattcagccttcatagcagccccacaccaaggccaaaattgagaagacctgtccagttagttacccatggtcccttttgagaacatagaagacagagtttttattaagggctttgatatgatatgatgtggtaacagatcagggatttttgcaagagaattctcccagctctctgaggcaaatgcgtctgaaagtggccatggccgttagagaatgctctccatgaaatgccataccattcatggaaataaggagaatggctgtatattcaattttagtcggttacattcaatttcctctttattcctcctgatttacagacagatagtagaaatactcttccattgatttataaggtcaggggtgttcttctgacaggataaattgggagcagataaatatgcactctccaggaactctgcaaatattaatcatatttccgtgagaagcgattgtcatgaaacctattcaactccgcactgacaggtcttggcctatgtgccaagtgttctgttcatgttagatgatcaaaggcaaagaagactcttaagcagcttaggcaattatcacctctctcctaagagcatacttatttattatcactgtcagcattacatttcttcctcctttacaaagcacacagctgaagggagtattaagttggtttcaactctgcttagatatgtgaaagtatgtatgaagacccaagctggaacaaactggcactgataataaaggtgtttctacatccaaacaacatgtctgagaactctgtccagtgcaattggcaatgattatataggaatttttttaaatgcctgctactgtaccaggattgaaataaatcaagaagtgctttttcttattgttattatttggtcctgttaatttaagatatttgtccaaaccctgtaaccatgtcacttgctatactgttttgttcaggtaatgctgatggacccctaatagagaagttttgcagcctgtcagcaccaagagtgcccttggtcatcccctaccctcaggtgtggatacattttgtcagcaatgaacgtgtagaatatactggattctacgtagagtattcctttacaagtaagctctgaaacataccacatatagatatatagatttacatctaggtatataatggtttcatttttaatttcaatgaaaatttccaggttaaatttttaaccagttgttactgataccaagaaaagaattttatggttttttatatattttcctttattctggagaccccactatattcttatggttttaatactttgattctcgttcatttctttgtgtagacaattctgtcttcttcaaactgctttcttttcattttgttttatatggtttggtttagttcctaagtttggtcaacttgcattgacatattttctcttgtaaaccaatcttgaattttaggataaattctacatggtcacagtttatgttttattcagattactgaatattacttataatttgtgttggatatacatgtgtgatattcagagtttatatgtagaagttcaatcccaggtaggtaacacaacttcttgtcttggttcacagatgatttttttttctggcccctttcactaacatggtaattctctcagatttgtgaaaatgttcccttgtgtgaaagtctgaagttatacctcctgtatctgccttgtctccagaacattagttcccaccctaagcccatgtcttgggtttgttttttctatttatgtatgtatgtatgtatgtatgtatgtatgtatgtatgtatgtatctaatgtatatgagtatgctgtagctgtcttcagacacaccagaacaaggcattggatcccattacagatggttgtgagccaccatgtggctgttggtaattgaattcagggcgtctggaagagtagtcagtgctcttaatagctgagccatctctgcagccccccatgtcttagtcttaactgtcttagtcagccacactttctgtttggcactgctcctctgtgtttgagtgcatttcttgtttacagatttttagaaacccactcttctctctgttgagtttgactgtgatcaacatgttttgctatagttttgtatattgttatctgtgttataacaaaattcatggttgaaggagggaataagctcaaacataatattcatgggcaaacctttcatccatctgttgtttttcatcctattggaagaagaattgggcaaagaaacaatgttgtttatattgaacagcagatcatatgattatacagacctgtaccatcttttcaacctgctataattatctaccctttgaaacccaagcacttgttatgaaatgatgatatatttgattgtggggcagatcatttcttcagggtacctatagtctcacggtctggtgttctcaagaaaagtaatgttatttatactttctatagcacattcttagctacataatatggataattagtctccatatacagtaaagacaatctcctttatcctgttaagttgaggctctctttactgtggaaatctgtttgatgtacaccatttgggagtcagttcatttgctcctgttctagccaactttgatcttgctcaggtttgggttcatgattgattgcttgactgatcatatttttaccagaaagtttgataataataattaagaattgtgtcagctctgtgagatttttcttctctcttattagaggtttataaatctaatttcagactgtggtggaatacagacaggtgagaatggagtgatctcaagtcctaactatccaaacttgtacagcagatggacccaatgttcatggctactagaagccccagaaggacataccatcactgtgagttcttacaactgggttaaatgttgacaggactgaatcagggaaatggtgtgtgtgtgtgtgtgtgtgtgtgtgtgtgtgtgtgtgtgtgtgtgtgtgtatgtgtgtgtgtgtgtgtgcatgagtgtgttgtgaaagtacatgtatatgtaagtgtgcaagagtgtataagagtgtgagtgtgtgagtgtatgtgtgagtgagtgggtgtgtgcatgcatgtgcatgtgtgtatgagtgtatgtgtatgtgagtgtgtgtgaatgggtaagagtgtaagtgtatatgtatttatgagtgtgtgagagtatatgtatttatgagtgtgtgagagtagaagagtgttaaagaatgtgagtgtatgagtgtatatgtgtgtgatatgaatgtgtgtatgagtgtatgtttatgtgagtgtgtgtgaatgcatagattgtgagtgtatgtgtggttatgagtgtgtgtcagtgtaagaatatgtaagaatgtgagtgttttgtgtgagagttggtgtgtgcatgcatgtgcatgtgtgcgtatgtgtatgtgagtgtgtgtgaatgggtaaaagtgtgagggtatgtgtctttaagagtgtttgcaaaagtgtgtaagagtgtgtgagcatatgtgtgtgtgagagtgagtgtgtgcatgcatgccatgagtgtgtgtatgtatgtttgtacctgtatatgtaagcaaccagactttgcatttataatcaaatatatttttctataaaattctttgtttaaagtacatatttttctctacaattaatgtgaagaatgttatctttttcattactaaaaattagtagaagataatttagcctccaggaaagagatggattcagtaatgacaggagctgtcgttttagcctaaatgactgcacttcttggacaaaactaaactatttttaaatttacaagagaacttttaataaggaaaacagtgtgggcatgagagaatgaaagaaccagaaatagaaaaccatctgacttacaaggaaatcaaatcttctgtagaaaacttgctgcctggaggcagggtgactccttttagggtgactccttttagggtgactccttttagggtgactccgtttcagctcatggggactcatcatgccttttctcttctgcagctcacatttagtgactttagtgtggagaaccatccaacttgcacgtcagactcggtcactgtcaggaatggtgactcccctggatcacccatcataggacgatactgtggacagtcagtccctgggccaatacagtctggttccaaccagcttgtagtaacctttaacacaaacaatcaagggcaaagtcgtggattttatgcaacatggaacacaaacactttaggtaaaaagaaaaaatatatcttctctatacttaaccttctttttttttcagtgagacattttttttcttaactagtttaaagtatagccattcctgaagaggagtgggttccaggactccactcagtacccaaatctacgagtgctaaagtttcttgtgcaaaatgatgtagtacttgtgtgtaatgtatgaatgtcctccagaaaacattctctctctagattatttgtaatccataatatatatatgtgtgtatatatatatacacatacatatatgatgtatatagtcgcaacatatcatattgtccaggagacaatgataagagacaaacagtcttactctcagaaaacaggaaggatgttcaaagagttaagacagggtctatattatgaagagtcttgattgatgaattgccccctggagatatggcatgttaatgagtagtttgaggagatatggcatgttaatgagaagtttgagggtaaaaacagatatacttagtgttttagaataaaaataaaatctgctatggattctgaatcaaaagaagacaagggatgtgattttttaaagtagcatcgtacctatgaaatatgaatattatgaaaggtctcagaaactataggtgcttgtattggatagttatccaggatgttagtaaatcctaaccatccaaggacaattcttcatcccagagttggttaagatgaagatctctatagaatgagtccaactcctccttaaaccattagctttccctgagttcaccatagagaagaaccgttggctccagagcaaaagatcatgcaatgccccttaatttaatttcattctgttctaaattcatatttttctttgttatctcttaggtatatgttttaagcttatgaaaatcatcctagacttttctttctttatatccctacgagttattccgaactataaatgagtttcaatatgaatgagcaagactattaagtaggaggagcttctcaagttttttttttttttttttaacattttctttagttcagtgtggtaaactgaaatatcaaaggctcatagaagtgtactctcatgtgttagtgttaagaaaatgcagagtgagtgtagtctggctaccttcctactacacagtcttaaagtagaaaaggttgattgcttggagcagaatgggagcagactatctactatgatttgaaggctcagatcgaatgacttcagatgggttaagtgtgggcataccaaaatggtgatagtcatccatttaaagcccttcacataatgggctcctgcttattccatgcccccaaaatgagtcagatataagaaaagatgagttgtgatctcacatgtagaaatgttctctagccatctttggtttccaaagttgatattttatcttgaagactgatttttttttccttatggaaaatttccaggttgtggtggaacacttcactcagataatggtacaatcaaatctcctcattggcctcagacattcccagaaaacagcagatgttcctggacagctgtcactcatgaaagtaaacactgggagattagctttgacagcaatttccgaatccccagcagtgacagccagtgtcggaacagctttgtgaaggttggtgcacacctttgtttaactcgttttgtgaatggaagcattttggctatagagaactggaagacatttctcaaagagaagagggtacagttttgttgcttgaattgtttagatgtaaaatgaagaaacctcagctttagaaagtaaggtttgaaccctggagtacacactgtcctgtagccttccatctgatgatcagggcagagcaactaaattaaggacattttcctctgaccttcttaaattgtcatgagcattggtggatggtttctcctttcctttttcaattcttccttctctccttcccctccatccttgctctttctctttctgttcctatttttgtcttcctatccaaaaggaagttcagtacaaatagtatacggtttcatcacaaggcaaatttaacatatgctatgaaaattacaggaggttggagtagctaattctggacattgagagtctcaatggtaaaacaaccatgaaagaccctcttaaaaatgatggcaaacaggaaggtagacaggcagctatcctctggagcagcttctctgctcactcaacattgattggcactttccacttacatgaccataactgtattgtaagttcactttagctgtgctatcttgcatatagtctcatggggagactatgccttttagtggagagaccaataggctcaagtgccatttgcagggaatatattcatctctttcatacttaacacccacatgtatttttatgattcaatttaatattttggctctaactataaaatgaagagattgatccctacttcagtagagttgttttaaacattagaagtaatatgccataatcacataaatactacctagtactttggaatataaaagttgcctaatgaatgtaaatgtccttttaaaaatcagtgttatgatttcatattatctcccaaattgttttatattacattgatctattcttcctatttaaatgaaactctaatacttacaaaatatgcacataataaaataggtttaatatacacccctcatttgcattttcccatgaagtaagagagctctcttttcacaagacagtcaccacagtgcagaagcttcagcgaagtcttcttagtttctgaatgggaaaaagttaatctaagaaaccaacttgggatcacagaagttcctctgacagtgtcatataagcccagggccaacccaagttgagatcaattagtaatattgccaaaataagtaacagaagaaacactcttactgagtgtgagacttctcattggcaagattataactgtgttatgaagctcttttttattccaaaggatacttctgtatagatggaagtcatgagtaaaggacccagggataacaaactctgtggagtgagcaggtccttggtgactttgagtcagagtctattttctttgtagagacaataggaaaggtagagagaatggtcaaagtccaaaacccttctttgttctaaaaatcagagattctgatccccttttagggtactagtagggaaatactactcaatactttctctttgatggagaaaagcacagaggtgaaaacacatggctggaactatatagacctaggaagtattaactagtctaggtaggactgactttacatacatataaccctagcatttaaggggtagaggtatcctttcatcttcactccaaactttgtctctgaaactccttccatgggtattttgttccctgttctaaggaggaatgaaatatccacacgttcatcttccttcttcttgattttcttgtgttttgcaaattgtatcttgggtattctaagtttctgggctaatatccacttatcagtgagtgcatatctagtgactaattttgtgattgggttacctcactaaggatgatatccttcagatccatccatttgcccaagaatttcatgaattcattgtttttaatagctgagcagtactccattgtgtaaatgtaccatattttctgtatccattcctctgttgagggtcatctgggttctttccagcttctggccattataaataaggctgctatgaacatagtagagcatgtgtccttattaccagttggaacatcttctgggtatatgcccaggagaggtattgctggatcttccggtagtactatgtccaattttctgaggaaccaccagactgacttccagagtggttgtacaagcttgcaatcctaccagcaatggaggagtgttcctctttctccacatcctcgctagcatctgctgtcacctgaatttctgatcttagccattctgactggtgtgaggtggaatctcaaggttgttttgatttgcatttccctgatgactaaggatgttgaacattttttcaggtgcttctcagccatcccataatcagccaccaaacccagacactattgcatacgccagcaagattttgctgaaaggaccttgatatagctgtctcatgtgaggctatgccagtgcctggcaaatacagaagtagatgctcacaatcatctataggatggaacataggaccccccaatggaggagctagagaatgtacccaaggagctgaaggggtctacaaccctataggtggaacaacaatatgaactaaccagtaccccccagagctcatgtctctagctgcatatatagcagaagatggcctagtcagccatcattgggaagagagacccctaggtcttgcaaactttatatgccccaataaaggggaatgctagggccaagaagtgggagtgggtgcgtaagggagcagggcggagggagggtatagggaacttttgggatagcattttaagtgtaaataaagaaaatatctaattaaaaatagttcaaacccttaaaaaaaaaaaagaggtagaggcaggaggacgagggtgccaactcactcttggtgacgtaagaagtttgaggacagcctgatccatatgagacactgtctcaaaaaataaaaggaaggaaatgtaagtaacatcccagaagtcccataaaaactaaggtgaaaaaaagtataccacagatcttcagaaaatccacttcccattagaaacagagcccaggaatatgtgcaagactatgcactgaacataaaccatgacattgttctggaataaagcaaggaaataggactcatagccaactaacttaaaaaaataatatacttagatcacataaagaggatacttatttaatcttatgggctttttattgaatatagttattttcaagcctaaacatggtaaaatattgacaggtgaaaactgttagtactaagtcatattttgaccccaacaggtctgggaaggaatgttagagaccaacgatgccctgttagccacaagctgtgggaatgtggctccaagtcccattgtcacattaggaaacattttcactgctgtcttccaatctgaggagatgccagcccagggcttctctgcatccttcattagccgtaagtaatctacactgttgaggaaggatggggaatagcggaagagccacatcaagattggcttgatagggaagaaacattggaaagccaactcatgctgaaggaatatccttcctttatagttagtgagatacaggcatggctgtccatgcctgcatcttcataaggcaaaggcagggaaaattggaatgtgaaattagttcagaggttgtcatctgtgttctttctttacgtgaactatatttaatctttgataatttatcttcttaaaacattatgagatttgaagtgtattgtgtggcaaaatatctactacttagcatcctcatgatattctaaaatgtttttattttgtgcacatgttgacttagggatcaaagactccttctcttagtgctcttcttccatttgaagtctcgagtatctctagagacttcataaaatggaagtcatatctttttatgaaataggcactacagacgataatgaatatcctgatgatagtttttattctcctgtaggttgtggacgtacattcaatagctctacaggtgacatcgtctctccaaacttcccaaagcactatgacaacaacatgaactgtaactactacatagatgttgcaccacagtctctggtcatcctgacgtttgtgtcctttcatttggaaggtatattcattctttcccaaaaagtaatgttaaccaataaaaaatcatatatctacagtgttggcacagggctttaataaaggttttggtaaaggaataggttgtggctatgtgaagctagttaaaatatctactaacatatttaaaatgtcttgattgtgagaatatgtaatctattttcttagcaatattaaagtatataatgcattcttaatataatctccaggctatacagaagattttctgaagttattctttttttcacaataaggttaagtactgtgacctttgataggcatctccccttccttacatttagtaaccagtgttctgctctacaagttcagctttgttagatttcacagagaaatgggaatgtgggcagtttttctgtgtctggtttctttcgtttagcataatgcttggaaatctatccatgttgtaaccaactacaatatgtccttctttgtaaggacaggacagtattctgttgtgttctttcatctgtctgtctgtgtcattcttttgattcaccaggcaaaggacatttgggttggcttcatatcttggctattatggataatcatggaacaaacatggaaggatagatcggtcttcatttcctcggggtgtatgcccaggagtagagttactggataagatcataagtctatttttaattttttgagacagctctcttttccataatggctgaaccaatttatatgcccatgtatccaccattactgaactcttatcttttgataatatccaaggattcagtttatctcaagcaaattacaaataatcaagcagttaatgggagaaatgtaggcagagtggtctaaaacctctacttgaagataataataaacatcttctgaaatgtaatggaagtgaaaataaaattacatccttttatctccatactgaggactgaacttggggccctaatgcatgagcagcaagcactctacaaccaagctgtagctacaccctgttatgttttattgtgaaacagggtcttattaagttgtccaagctggttttgaattttgatgtaaatcaagcatgcctattactcctgcttcagtctgcagagaagctgaggccataggcctggcttccttctcttttttaaagaataccagtaccgttttatatattccatgcataactgaaaaaaatacagtaactttaaaatcataggcaccacataaattgcttaaagaagatgcatctgaagcctgttccattttaacagagcatcttacttttcaagcacaggtgattggactgagggatggatggacaccaagcttggcaagtgatctgccactaagttatctgcccaggcctatttcatttttagttttgagacagagtctggctaaactactcacattagccatgaacttgctctattgacttggttggcctcaaacttgcaaaatgcctcctcagactcccaagtagctgggattccaggcctgtgccatcaggccaggtccatagcttttaatgtattcatttgcatctattctcagtacacatgcatgtaaacacatacctacaatctctgtaaactagccaatgagagaagcgatcctacaagtcagaatgggcacccagtccatattgaataagtaagtgggtggataagattaggatctgctctactttcatgaaatagcaccatgggatatcctttcatatctgttcagtgaacattatcccccatgttcagattcctcagtggcaacgtttctaagcacacacactgctctgctcatttctcaactccaaggacagggctgtttgtccagtaaggttgctagtgtgagtaaggctatggctactactacacactaaatgtttagtgaaaacaagaatagaaatcccttcaagttggtgtgtgttttcacctactcatggtcatagtcatacttcctcacaaatcagctatttataaacttcaattaatctgtaattacactaatatgtttctgtattttcaagtcttagaggatacacacacacacaaaaaaaaaaaaatcaggcacattgacctaatattgagacgcagaatcaaatccagaattggtaatgtttcccggaattgtgtgattttcagtttaacaatcttatacatttttgctaactaaagaaaattttatagtcaatgtggttgactgaataaaacaaaccaaacacaaaacattgcatattctgtgatttcatttgtgagaatagtctagaataaagaaatcacacacagagaaagtagtctcatggggccaggaccacagttcagatagatagggattggttgccaatggacacaggtctctccataggatgctcagaatgtagaactggaaagactatcaaatctttaaagtgctgtgggagtgtcagcctttggggaaacctggaaagcactcctgcctcatctctagtaactcaaactctacaagtttgttctaacaaatgagaaacttcaaatatttttatacaatgatgcatcttttacaatatgtttagctacaagaatactgaatttattgacccaaggttcaggctttgactgaacatgaagtggtaatttttccattagaacttagtgagtacattagcaaaatgttttagagagctacctacaatgactaaagccctgaaattgatgctctgcgtgaacattggaaatgattgtcaggaaatatcaagggatttttcagattctgctcatagtcactcttacctgtatccaggttctgtgtaaaggttttcttaggagcagcaatgttgacattgtggactgcatgggtttgggggtttgtttgtttgtttgttttgtggcaggaggtctcagtatttgggtacggtcccatgtgtgttcaagcctgtttcaaagcttccctgtcctctatcccattctccaaggtgacaggcaaacttgtcttcagatatcacaacacatatcccctgggagacaagctgcctctggttgataattcctgggtaaacagaatggttctatacagaaacggaattctgggtaacaactgaatttactattatggaattctgtctgctttctcttgtctgcccatgttttgtctcttggagaaatacttcatgtggagctgaagttacacatagaaaagcatttcctaattgtgtttgtagtttctggatcagttacagaatcatagtattttgtctgcatttctgctctgacgccagttgttgtgtactctatgtagatcgctcagctgtctcgggaacctgcgattacgatggcttgcatatcatcaaaggtcacaacctctcttccactcctctcgtgaccatatgtggttctgaaaccttgcgtcccctcaccatagatggcccagtgatgctcaacttctattctgacgcatatatcacagactttgggttcaagatttcctacagagtcgccagtgagtaaccgtgctgctgtcctttggaattttcttgcattgtgtaacaaacatatgcagtttttgttattattcatcatatgtcaccaacttgaaggttaagaaacattaaggctaaatatgattaactaggcacatggtacaaaagtaggtatttttctttaaaataaacagttggaggctgcagagatgactctgtggctaaaagcactcactgctctctttcaggggacctgggtttgggttccaccactcacatggcagcttaaatgcccttttcattcctctgtgagtattatatgcatataatacagagaccagaagacatatacatatgtgcatacattttaaaatatattttttaaaaataaaataaaaattgacatttccccctgaaatttggctaaaattaccctatgaacataaaacagagaattgagattgattttgtgacagaaccttatcctacatggtcacttcagtgaaacaggcacataaaaccatccctgaatttgttctgtctttgcttaaccacatgaatggctaacggaaggaaataaagtagtttctcttcaaataaagtacttcttccatctacagagaatacaaacatgtatttctccatgaaaagagtcttatgatttgttcttagtagctggtgtctagttcctgaccctcagttactaaaaagtatgattctctgatacttttttctgcatcaacagaataaaatgcgtcttctcttatgctcttggatgaagagaaaggatttgctttattcttttagttaactaattaactaattgaataatttgtataattaagcccttgatgtatattctgctcttttagcctttagtttcctttggtatgaacatggttcaattcctttttgagtcttattttaagattatcattactactggcttcaaatcttggcaatgtgtggagatggacgttgtttgggcactgataaacattgaagaatcatgtaattaacctcaagtaaaatagagcagttgctacgcaagctgacatttaattcatgagctgtattcagggatctgaatgcataaggacttttggcacagaaaagattttgcccagtaaatggacagagttgaggcaaaaccaaataagcaaaagccttaaataacagccacaaaatttgtctaatcttggagatatgttagtagagtgtgttcattggtaaccatagaaacataatcaaaatgtacaaacatcatataattttagtatcataaaacaaataaacatgctcagaagcaaaacagcctaagttgggaatatctgatccttcctagataaaatccatgtaaaaacaataccttagtagtcatattggaacattattatcatagtgattacaattgttgattacggggtatagcaaagggctgttaatggctggagttagagcaaagagtggaccaaaactcctcatgcttcttgaacacaagccatcttccctatgaagggagcacaagtagggttctgcctgctgtctttgatcatcctcttgccatgtcatatctctgtcaacctgtgacttagagtgaagggacagacacatcccaacacacgaagtcttccttcttgttgctcttacactgtttgtcttagatttattaccttcatgtgccttaaaatattcttctacatttctcttccctggagaagtcgaatttatttataaacacagtgaaggaggtttaggtcatctgaaaaacaatcaatatgagttctgttaggagacggtaaacgatagcttagattatccccaaatgatttgcctatgttgtgagtaataagcaccctctgtacccttgtcttctgttccagactgtggtggaatctacagtggaacctatggagtccttaacagtccttccttctcatacaccaactaccccaacaatgtctactgtgtctacagtctgcaagttagaaacgacagattgatactacttcggtaagtgataccaaaaaggggggtggggctacttaagaaaacaccttcagctctgttcacaggaaagctaccttgctgacagagactatgagttctcatggtggcttagctggaatctagagaaaagcagaggggtcccacatggcagtaaagcctacaccctacacctgttccagtagagattggggtgaaaatagaagcttcaccagttaaaacagtccttgtaatttctcaacagttgtgaaggggcatcttacaatagctgtcaagttacaagcccctcttaaaaccaaagaggatataaagggttagaacaaagagttgccatttgttagacatgtcctatacatgagaagcttcgttcaacactttacttgaatgttttattgtactgttaaaactgtcaggagaaatatacatgtgtacttgtatatgtgtctcaaaaggtctcacatcttctcaaaggtaacacatatttaaatgaagaataaaaatctggattctcatttactgtctcccaaagccaatgtccgaaataacttttaccacctcttttctcctgaagataaacttaatcccataaagtttatttttatttgttaatcaaagcaactctagattgttgctttatgtgatattgccttggtttccattgctgtaaagagacaccatgaccaaggcaactcttttaaaggatagcatttaattggtgctggcaaacagtccattatcatcatggtaaggataatgcagcatggcagcatccagaccgacatggtgctggagaaggagctgagagctctacatcttgatcaaaagatagccaggagaagactaactcatgggctgctaggaggagggtctcattgcccacccccacactgatacactccctccaacaagaccacacatacaccaacaagaccacatctcctaattgtgccactccctgtgccaaacatattcaaaccattacagatatgtcacttgtaaattaactctctaattctacttattccaagcaagactgataaagaaaatgcagcccccattacccagaaatataaagtgctagttttctttctcctaagatggtttatttccatctcttcaatctcactgatacctgaaactactagcatgtgatatgaaatctgataatagtttatgagaatacagaattttctacatagaagcttgacaagctgggacaatacctactctgtcctctatttgtgacttatggtttatgaactctaaggcttacttatagtgtttgtgtgaccattttagaagaaagagacaagagactggaagaaccacaaccaaactatatgaaaccagaatttcttccacttttcttaacgtttttcctataaagaatcaaacaatactgtcactcatcatacaagaaaaaaaaggaataatatattttaggagagactgaaagtatctagcatgttattgaggtaataacatagaccatcttgtcaaacttgattttaggagctatagacaggtaagatatgctgaaagggttcaggtttctttaagatacaattgccaatgttaaaatgctaacctccatccatgctctaaatgtggtagaacacatcaaaacagggcatggaggtagtagggtgacttgatggaaacaggaaggggttcagtaggagagaagtgggtgagagacaataatgaggatggatgaggatcaaaaatatgatcaaagcacattatgtagacatggaattgtgatatctaaaaattgaaatctgttgaacataggcccagattatcttgaagcagaaaaccgtatcttattcatttttatatccccagtttctaccacagttcttagttataatagctacctaaaacatactggcttcagtccatcagtaataccttatttacaagattcccttccaagagaagcttgagtactgtgttgtcaggtttttgcattcttcttttataagaacctcagatatggtttaatgggcacaaataagacataagtagtaaccgggtaccctttacaggttcaatgattttgagattgttccctccaacctttgctcacatgattacctggaggttttcgatggtcccagcattggaaatcgatctattggaaagttctgtggttccacacttccacaagttattaagagcaccaataacagcctgaccctgctattcaagacagattcttctcaaacagcaagaggttggaaagtatctttccgggagacaataggtgagcatatgagatgtgaaagtatttttctggtgacttcttcttttgtgcttttaaaaattactcctgcccccagataaacacagttgatcttcctataaacatctaggaggcccaaacagaaggcctcattggctatggtccatttattcttcagtaaagagtcttgggaattctaagcactgactttatgactgttaaaaaaaaaaaaaaaaggagtgcttcaagaacccaatacctaggaaaagaacttagtacagaggtcttgatagaaggctttgactgccacacatggaaatcgaggtatagaaaataccaaagccctcaaaggtctttagtaggcaaaatgtatcagatgtagcatccaaagcttgatgggacactactaggggatgtaagttgagaatgaagtcttatgtgaaatttgttgaccaatgataccttagtctatattttccagaaagagtgttgtatttagtttgccatatttgtatctggcaggcctgccagacacttcagcggagatatctaggagatagctgaaaaggcatttggtctggaaatggtggtctcagagtcatgtgagatggccaggatgactaagagtggggataaactaaaaacaagagccaagctcatggtctctgtacatgaaaagataattatctacctaagattagtacaggaacacccatcatttaaaataaaaggcagctaatcaggtctctgtttgcactaattgcttcaatcgtataatttctatttgactctgcaaagtgttttgacttttccttgaatattgatgtgattaatgttctgagatctaatggatcctcaaacaaaccccatactctgagaagatgcagaaaggatgtgaggaatttgcctcaataaatcatctgggctcttatttccatactccactctgtctattcaccttcatccctgtgacctgaaaacaaagaacatttcaaacattttgttttccgtgttatgctttcctggatttatttgaaagatttatttaatgtatccatgtgcagatgactctatgcatgtgcctgtgtgagtaaatatgcacatgtgtatgcagatgtccacagaggccagagaaagaagaaggtatttggagatttggagatgcagtcattgggtatctgtgagctggaccatgttagtgctgggatccaaagtctgcttcttgagttcttatggctgagcagcaagagatcttggctgctgagccatctctccagcctccttaaaacagctctggaagggagttatcaggcagacatttatctcttataagctcctcataaattctgacaattgtatcataaagaccttttgccacctacctttcttagttgtcatgacaataacttgaaagcaggtctcataggacacagaatgaggcctcactagaatggtatatgtgaagtgacatgtaaaacacagaaggctattttaaaaggaaagcccactttcctttgaatgcttcaattttgcacagaggctctcttgtgttgggctaccactgtgcttcatacgaatagttttgccactttcccatctgtataaatgccattgtccacttgaagatgctcaagacataattcaaatgattgcatgtgcttttgggtgagaggtcaggtattataatttttaattgggtctcatgaagatattttagcccaaacaactaagtgtcctgaccagtctaagtagctttcagctttgttttgttgtttcatgtggtatgaaaagaagaagtaataaatgtagttttagggattctggaatcattcattacagacttgctaaaacataataaaaaaccaaaaggtcagacttggctaaaagcatacaccttcttttctcatctcatccatttaagccactccatcttttctataagaagataactgctctgtggaccaggctgactactcatttccaagagcatcagtctgcctggagagcaacacttttccaaagtaaatagatgcaaagaggagacccctgtagcccttaatatttctgtctagttttatattagctaaatctttaaatataccttttgaagctttgctgtttaaattatataattggcagtaatttataaacatctgctttaatttttgaaaagccacaacagttagtgtagcatctccttgagtgttggctacatttgtatttctcattggcagagagaagtacagggaaatattcagagtggataattagtaaatagataatgaagtgagtctcccttttgtgtggaatttctgttcagtgtgagaataaggaagggcaaagccagcacccaggatctaggatccatccagaacataaaattttctcataatcccattaatgtcaacaaaacatgggtggctgatcctgaaagaagagaagttagaaattattgtactgagcttccaggatccatgaaactgaaattatataagaagatgaacattttttttttctggattgagtgaatttgcatcctttattagcccacagatggctctgagatctcacccattccttgggatgatgtatgtcaggatcctggcctcctgctgatcacagcaaacatagtgacaatgggggcaactatctgtcttccttcacctggcttatgagtcagttagagaatgagtcaggtggcttcaaggtcaaactctggagctgtggtgagaggaaggcataaatacagaaaacacatgtttagcacggacagaatgaatcacaggtcaacaaagggaggaatgtggccaaaggggaagaactctgtaccagaattcaggtacccaggatgcaggtgtgatgctactactgcctgcgacggagcactagaaaaaccctaacctctctacattcaatttttacctactaaaggagatcagcttgaaatattagcccctctagtaatctgttctaggtaaagtagatcagatcctggaacataccgtggctatcctaaagtatattttatagcttaaatcagaaccctataggaggaacaacaatatgaactaaccagtacctccagagctgtgtctctagttgcatatgtagcagaggatggcctagttggccatcattgggaggagaagcccttggtcttgtgaagattatatgccctagtacaggggtatgccagggccaggaagcaggagtgggtgggttggggagcagggtggggggagggtatagaggacttttggagaggaaaccagaaaagggaatagcatttgaaatgtaaatgaagaaaatatctaataaaaaataacattaaaaaagaaagttaaaaaaaaagcatattccagtatcatcaacatttttatgtctctgaaatggactaggccatcctctgctacattttctctgagtctgtagagtaaatgtctatccttcagcaaatatccaaatggttttttagagctatgtgatgaaattaatggtcagataaggtaataagatgaaaagcattcaggatcaaaagagctaagaagcagtgattggatgtgcctgaagccacacaattctgtaaaatgcagctcagcatggtctccaataactggatgttcaggataagttattataaccataaatttcctgtaatcatccttccttacattgggttggttttgatgtagtgttctcaggaacataaaagcaaaaatagaaccaataaaatttaaacagtctttagctaccaatgagtcattcagaaatattgagagttctatgggactgattttctctttgatcttgcttgagaggagtctgctcacttggtctggtaatttcatattctgtctactcacaagaaatatgtcacaaaagcacagaacataatgagagcccgtcaccaaccacctccttctctagactgcttcatccagtccccaggactacctgatgggccaggaatgaacacattttacaatggaggaaatgataagtatttattagagattaaataatttgtggtcaaaccaaacattgaactaggtttgaccatttcctaaacccacactttcctaattggtctatgcatcctctagggcaattgatagaaatagccaaggctaaaggcaggtccctggaaggtttcctaagggagagttagctttcctctccctctgtgatagactcattctttccatgatcatcttctcgtttgagtgtacctggttttaagtcataggatgtcattcctgaatagaacattttgttatacatatatcataaatagtatataatctttatatatttcatttcacaatttcacatttacatgttatacagtgtatgctataatatttaaataaatatgactcttattaaactttatataaataacatcatactttaaataaaatttatgaaatttagcatgtaattataagcataataagtatacatgttgtgtagagatgaatatatgttgcaaaaattacttttggtgttggtagagaaatatcatatctgttcttctggctttgcatggcatagaagtgaggtggtagcccaactaagcacagctattgggagtatatcaatattataataaaggataataaatatgtacaacaaaaattagtagctccaaattatgagcttcaatttagtgaaagtttttaccttagcattcttaaggatttagatgctatattctgatggtggaagtctggttgatacacctgtcaagtagtccagtctaaaagtggaggaagtaagtcacaaaggaattaagagacctatcaaggacacttagcaacttctgagcagaggagaattgacctctgtcaccatcaactagtacctgccaccagggtagtcaaaattaaaatcagcagtatacttggtatgaggtttcaaattaatgaaaacaaaaccatttcatttccttatttaaatcattattataaaactacatctaaattttataaattccacttttatattatcatatgttttaagacatgcaagtaacatatgactacttatcttgctctctttaaacagaatgttttccactttttaaattcctgcttctgtaattgtcgatatttagtaaaatcatatccctttaaagagggagtatgcttgttaacgtgtcctaaattcttcaaattaatggatgtgctctacctgatgatatactatactatcagtacactatacagtacacggacgatatactgaatactccgagattcaaactccttatcagacctggcatcacttgttgcaaagaaatattttcctactatgagactgcccattaggcaaaatagtcactattttggatcttttgttgaaatttttactactgttctgctaaaatatgcggtcaaaaaggtcatgaaaattacaaaaattggctttgaaaataggctaacattgctaaaaagacattttgctaatgtgtgtgtacttgtgcataaatatgtttttataataagcaacaattttatgatcaagatttaattataaaattatttaataataaaagttatcattctaaccctttactagacaaatctttacaaagatccatctaatcattatttgttttctatgtattccttcactgttttttatattattttttattttatattatttcctagctaattactatatgggcagtgatttaagaatgcaaaagtgagtttagcaaggtcctatgcttgacaaactctaaatcagaagtcaacatctccttgtaaatttggtatgatacctctcttttgctatgaaaatggctgtcctgaatcttggtgtaggctttggagtaccagacccagtttctaatcttaacaagtttggcttgggcaatatacaaagctatgctgccttggtcttctattctataaaatggacacatttatctttgtagaggtctgtagtgttgattaaactagataaacctctgtatttatttgacaactgagtacagctctaaccagcaaatttgtcttgagaggttgacagagactgggatccatactttctatgaagaagaacaatcatgcataactactgtgtcctcctgggagattaattcatattgttatgcaataacatctgaaaatgacttatctatgatttccatttttcttgatttagaaatacacacacacacacacacacacacacacacacacacacacacatatctcatcatccttttcgaccaaaaagcatttggttgaaaactctaattatacatgtacacatgtatttgcataacatatttgttgaccattttgcttccaaagagtatatttggtgtttggctttttcttccaattggagaatttaacatttaatacatttttgtgcaacagaattactgatgttgcctgatttcactcaacctttgtgctcttttctctttgtccttcctctttgtactctttgtatgttcccttagccatcctttcttgcctttaaatgttttattgcatttaacttgccacttatcgtgtgtgcatgtgttttggattgcgtgtcacagtgcccagaactttgcaggagtcttcctgctgtgtgggtctcggggactgaaccccattcttcagcctcggggcgggctcttttcgtctgctgacctacctctctcactccttttctttgcttcttaaaaaaaaaaagtaatcaccttttatgttatttcacacacaatctgttattttagctcttaccttatagaccatactatttatctgtggcttgaatttctttgaattagtatggtgcctacagaatagctcatagagttcatctcagtgaagacagtaagaagtgaacaacagtccttggctttatttcttgagagtggccacaccccaccaagcccccttttgatatagatctaagtatacagcagaatgaatggaaacctgggcttaggctgctacctagtgttgacaaatcagaggtgcctgtgcacaaaacagacaaagccagtctctgtaccgtctttacaggcacagcattctgtccttatagagatcctgctggtcttggcaaacgttgaccaagggaaggaagagttgtcatgctgcggtttgatgcctagactatttaagaagtagcttttgtgaactgtagttactcaactgagatttgaaggactagtcttaccacatcatccatgactcactataatctaatttaaaaatagcatttttatcattttatgatcagttcagtggccttagaacattatgcatgtgccttcatttaaatgtgtacccagatattccatctcctttagtgattacaaatgatgtgtttttcagtcttttccctctcttgcacattgctaatacatagaaatgttacaggttttgatgtgctgttatacatattcagattttgactgactgtattcttgggtctaagaactatcatacatattcaggttttgagtgactggattcgtgggtctaagagtgtatttgcatatccctcagaattgttctataaggagaagaatggcatctgcaaacagtgacacctggattccttcctttccaggcttttgttcccttaagtattaacggccaagactttaatagtgatgattaagagttgtaagaaaaccaccatttcttgtcctcatcttgaagggctgattaactgtttacctttacctttgctactagagactcacaggatggcttgctcatctgagtacttgccatgcaagttgcaatcctcagcacacagataaaaagccaagcacagaggtgtgcatctataatctcaatgctgggagttagccaggaagatccatagtgtttgctggccaggctagccaaattagcaagctccagattcagtaagaggctctatttcaaaatataatatgaagaaccattgaaaaagagactggatatcagcctattgctttcccaggcatgaacacacacacacacacacacacacacacacacacacacacacccttctttcaaaagtttgctaatagctctaagttctacaggtattctttatcaaactgagaaatttcccttctaatcttagttttctgggaggtttttaacctgaggttgtgcagtattctacaaaatccttttatagaaatagagacagcaagttcatcagaaaccacgttgaatccttaagcagattcataacgctggagcagctgacacaacagctgtgaaagtcccagtgaggtttactccaactaaggatgccgaagcccaagctccacaatctgaagagaagccaccgtgatgtgacacactctgtctgatgagggcactgcttttagatgcatctgtgttacaacgcccccagtcacagatgttcctgaaagacaggactatactaaagtcagggtgatctttatcttaagtgcagctgctccctaacctccagagacaggcaaagacctcaagaaggtgctgtcagtcctcaaaataacttcttaataagcagtctccctccactaaagcagctaagatgtttctcctagatatggcagatatttcttcccttatcagactaatgctgccttcagcttcactctgaagtttaatctttcaggattcagttactgactcaattaaatagatctggccgaatctctgctgaatatgggtttatacctccaggaggtctcccagctcctgccccacacctctgtgcaaacatttttttctcccaaccgaagaaatagctcctgatagttaaatacagaagaatgctatagtgatatttgttcttgggtacaaggtatgtcatcaaagtggttctggtagagtctgactggtgagaaaggtgctggtcactaagcattttctaaatgaatatatatatatatatatatatatatatatatatatatatatatatatacacacacacacacactgtaacaggaaacatgatcaatttgtgatgttgaagcagaacaatgttaggatatctttaccagaaagaaggaacttcaagttagcaattcagaaaatacaggtatacatgggactgtaccctagttattatttatattataacttggcactccaggtatgtgggcacagagatgtggccttcactctttgtagcattgctccctttttctgttaacattactgtttacatcctccaaaggcacacacttgcatttccatctgccttaggaaaattggaagcacagagaagctgcactctgtataaatactaaaacgggacactttctaccatcttcatttccagaaccctgcaaatccccatctgctcacgtgatactgtgtttctttcagttacttggctattttggccaaagttatctgactgataatattggttaacattaggtgatattagctttccattttctttattctgtattatatgaattgacttttttacaacagtaagacaaattctctctctctctctctctctctctctctctctctctgtctgtgtgtgtgtgtgtgggggggggagggggtatgtatgtgctgcaatggtgacactgtatagccagctgttctgatatcagtagcttataacaaaagcatttatgggtactcagagtcactagcctgcctccataccaggcatatctacctcatgacactacttttattagtagtggtattgctaccacggtatggtaagtgtgcataatgccatttactttgagacaagtcactgttctcttattaacttgttggcaataattaacacacaaatagtgttaaaatctacaggttaattttttaaaagcaacagttcatttcttgaggctgatatattaatggagtgatgtatgttaagttcaaactccactgcctcttgctaatccagattggatattgtagcagtggtctcatctctgacgttagctcccctagtcagcttttcctgtaatatgctactaccagattcaatttcagttcaaatgatactactactcctgtaatcaaaaatccttccaagaggctgtagacggcttaagggttaactacttttctagtgtattaaagctcattcacaacacacagagaggcggttcacaatgcatacatctccagctccaagcaatctaactcttcacccttctggccttgacaggcactcacacacatgtagcagttgctcacacatacagttaatgatgataataataataataataataataataataataataataataataaatattccaagtggatcctcactatccataggacaaaatcaaaggctttttatggtctagttttgagctctattatggtccttcatttgtctcatagttttcagatcaaaattgtgccttcctatgctcagcctggtgtgatcttgctggggacaaagtgacatgcttccttctcctaggacagagccctgcagggagtgagtctccaccagtgtccatggctgctatgggcataaggtttgtttgtatagcaatgtacatattttctggagccagtactagcagtggaggactctcctcctgaagaatgccctccctgttaatgttaatgacttcataataattagaaacatcactagttcaggagttgagggtgttgctatgtctcagcaaaatggtagatgctgggaccttcaggacagccctcaaggctgtggaaaataactctgaaaccatgagtttaaatatatatgatttttttcaactatacaaaaatataaggatgcaatatgaattatgaggagcttcatgaatctaaagggacaaaggcagctacactatgagccagcctatcagaaagatgcaaaggcagatagatttccgagttcaaggtcagcctagaacaaagcaaggttaggcccagatgtggtaggaaggtcaaaaacagaaaataagttgtgcttgtgtctagtgcaaggctgcagaccattcatttgtgtactaatttaatattatttttgttgtgattactttgagtttaattcaacctgaccctttctttagaaattggcagcttttcttcatttcatgttcgtcctatgtcatttctgagatacccgttatgctgtggagtaaatacatcctaaatccagcgggttttgtttctgttctttcctgcagtagacaaacactcatcattaagatactctgtattctgtaatttgtaatgcatgactagttgtttaatttcagtgtagatagtttttacctagtggatttcttttattctttagtctcctcctgacttggttttggaaaagataaaaaataaaatacaaagaatgtgatttaatgtaaagtaggagtcagagctgtctcctcacagcctctttctgtcaaactatttaaatgaaaaactagttgagaggtaatttttttagaagtattggataaatcttcataaattcaattttcagtgttagcagtgttcacaaaagtagaacataaaagtcaggcatgcgcacatttcccaccagctttattatgcaaaaaacatcgattttcagaaaattgagtttttcagggttggaaaagcttgaataaatcgcatgaatagctctacagaggcacatgcatgcaccccagtgtggttactcactctctcaggcatctatatgtgctgataaggaggcgactcagtgatgggaaaaaagaattagcaagaagccaagaaaagctgagaaacacacgtgcacactccctagttttcggggacctcttgataatatttgcaagtctgtgggagaaaatggaacctctcctctttaaaatccttccacagtaatgtgaaggtcgttttgttcttctgcacaatgatgtatctttcgtttgacaggaccacagcaagggtgtggtgggtacctgactgaggacagcaagagctttgtgtctcctgatcatgactcagatggactttatgacaaaggtctaaactgcatatggtacataattgcccctgaaaacaaacttgttaagctcaccttcaatgcatttactctggaggaaccatcgtcgccaggaaaatgcacctttgattacgtgcaggtaagactgctacaccttaacagtctactctaacgaatgggattttagcttactatctacaagccttgaaaatgagaacactattgcttacagtggcttcaatatatattgtagttgctagcctcctgttcaagttcatctctgatatcatcattcaaacatctcaagtgacttctaacattagcttcaagattcagttctgtcttgctaagtgccttgttatgaagcgatccatgggaagattagtcggacagagtgaggttgtcagaggactttcacaattcctaatgtaaatggtatctgaagtgcaaaaatacactgtaattggtctgtcccttttatttacgtagatagcatccaaagcttcctaaaaattccaaagaaacatttttttaagacagtgtgaagctagacggccaaactcccatcgacgtctaggaagggtgccaaggacaggatgcaccgggaggaccaaagatgaagggacgaaaatggatgactgagaaaagcttgtgacatccaggaacagtgtggtgcatggaagtcaggggaagatgcctttccaaatgatgtgtgggtagccagtggtgttaagctgtaggtcacagacaaagaaaagctgagatgaagaaagccattccattgggtgacaaccatcttaataagacatggggctagaagccagccattgtgagggagttcatgaggggctagaggtgacaaaatgtgggacaaaagtgttaattcaagttcagtccttctctaaaatgagaccaagtagccagaactacttaagaggttatttaaaaccagcttctctgggttcctgaaaagtagtaagatttgaaggcagatagtaagtagtcccacagccagaaagcacagagggatcagttctgacactcagctcatattttcctttttattcagtctagagtcccaaatcatgaattggtactgcccacatttagggtgggttctttcaaattcagttaacccaatctcggcactttctcacaggcatgcccagaagttggtcccttggtgattctagatcatgttgaggtgatatcagtatttactaccccccttttaaattgttaaatgttgtggtaaaatgacattctatagaagctaatgacacagctctataagtagtgtgtaagacagattataccagttccattgctgagttatgcctactcccttcactgctgtctttgagagtgtttactaggggaccaaggggggacatctgctgtagattaatgaactgtggctgatcaatgactgttgaaaccatcgtcacatctgtcctatggagttgtttggtagccatggtacataatatgggagatgtggcagtgaacgttccccaaggagatgtaattcattgggattggggggggggggagactggcctgtaaacagatacattatacaacatgaaaacagaagttagatacccttgacgtagaaaaggagatcagaacagagtatgtcgggcttcttagatgtgagcatgccatggcacttaacagcatcatgaaagctcacacatattgttgcctccataaaatggagaacagtatcaacaaggcatatccacaagaaagacatgaccaaaaataaggggaaaggacagtgctgtgtactacctaatctccaactcttggttagttcagtcatccttgtgttgagcaacagtaaggtggttgagggcatcaaaagtgtggtcctcctgcttcctctacctggaaacatgacactggtggaagtttcccaaggtttcttcctcaacttggtgctcttggttttggcagatatattttaaagtttccagtcccatctgaagagaaaattccctgtacttactatcctatgggattcagaaatgtgacttctaaacactaaatgcttcaaattattgttgtaaggccaattataaactcctgaacatcaaacttgcataaaaacattccctagagctttctgggagcccttgtaataactcactgggcttaacccttctgcatattatcaggcactggggaagggtgtgtgcctctttagggacaacatcagcagaccctaggtgcattggttaggagatagcactgccactaagcattcatgtacttagttattcattaaataagtgtgaatttcagtctacctcattatagatattagctcaaacatttaaaaatgcataaagagtaaataattattactgtgatactttgaatcttacatgacccaccaaagcacagccgttaagaagacatggttggtagcatgggagtcagttaggaaggtaggttactgaggacactgccgtttgaaagatacctgagtcccaaccactcttttctatctgcatcagtgcttctgtgaagtatataacccccaccccctgtgtgtccttctgtcatgaccttaacacagtcctagaacaacaaagctctataactgtgttgctatagagattagtcgtgcaaagactgagtcctagagacaaagtatatcttgagttgactattataggcattttgtcacagtgacaccaagaaacaaggcttctagaaggcaaggtgtgcctgagttagtgttcagacactaactcaccacagacatgcagtccctgctccagtgttgttcagggtctacccacagcaagagatttggtgttggcaaggaacagaacagagaaataatttcaggtttgatcatacaggaggctagtagtcatgcagtttgtaactatatattccaatcagttacgctaactcttactttaatgtggttggatgaatatagtaccagcacagggccaccttctacccagccctagcttgtccttgtcctgcccctcacatctaccagtctctaactgacgttggtcttgtaaagtaagacccaggctcctcggcatgaactgggtggtcttccccgactctctctctcttttatagtatgaatctccttgatattatttgacagaattaccttttcttttctttggtttcttttttatatttttccatgcatatttgtagatatatctgtaaacagcaacacacacacagacacacacacacacacacacacgcacatgcgcgcacatacgtttatatttagctctttcttctcactattttatgagcaccttgaaggtacataaatgctcttatgtctctccatatacacactacccaacacaagccaggtacatgatacaagtgaaagcttgtatagaccacagtggttgtaatgaaacctcacttagcagaaaaagtatgttgtctttaacttggcaactcttctctataaagtgagggtgtttgactacagaacttcacttttctgtgctcctcgtgaattcatatagaagagacagcaccatctagtggtcagttttgtttcattttttaattttgaaatttatcatgttcattttataacatcagtggccacactactctgagatttctgatctaatgtggttctgttatgaactcatattcagggctacagaaacacagaaaatcattattaaagtacaataaaaattaacaacatagacataaaaatgaaaacatactatattaatttatttatttatttatttattttttagtaaagtgtttgagggatatacaaatcctcactatttctttgggtgtttgtaaaaatctgtgaaagccatcagtagttctggatgctagagacacttctgagcataactccgtttctcttcctgtgaaactcacacttgtgcagagggggcgcccaatcaaagtaaataagcattacattgattgagtttcatcacagtaaaataaaacaagatggtattggaggagggccccactgtgtgggattagactctcaggggaggtgacatttgagtaaaaggtctatgactagggattatcagtccttcaagaaagactatgtctccaagggaggagactgtcagaggcagcaagcactgggaagggagagaagcaacagcattgaccagggcttgcaagttctgcattgggtacaaggtatagttttgtaggaagaatagacacatactctaggtcatcaaacacctgggcactacggtgcagaactctgtgagtgctctgtgcaattgatctgtgagccatgttctgaagaaactgtgtcacatggcattgatacaatatatttcgaaagtggaacaaagtggggatgcttatcatgggaatgggagagttgagtatgactggaatttagacttgagctgtttattgagatagagtagactcagggagaatattttagggaagggtgatgctgtggtgtgtacatatcactcaagtacctgtggtagaaatgtaaaccttatatccatatgctaaaggtatggggggctttgaggtataactggggttagatgaagtcatgagagtggggttcctatcatggggtgaatagtatcaccccaggagaggaagagattgccgagctggcatgctcctgatgatcttcttaggatgctcatatgttagaaggcaagaaggccctcatcaaagtctgccccttgaattctgaatgttcctcaatcctcagaaatatcacaattaacttacttgtgtataaatgacatggtctatggtactctggtacagcaacataaaacaaaccaaggcatgtgggtcatagggaagggtcaaagcacttaccaagaagcgagtaagcatggtttatgcattacacactcttaaggtctggggcgatatggcggaacagaataaaattctgtgcttctgtggaatgttgtattcattttagaaggaaaggcaatagaattggcaagttaaatgtgtaacatgttgacagtaatacttgtcctgaggaaaggagtcaggggatgtgggcagtgttcactttagggaaggcattgctggtggatgatagaggaagagagacctcaacagactccatgaataccagcaagggtggtctgggcaaaggaaggcagatgcaatagctgggaagctagactgagctggggatgttcaagaatctcaatcaagcagagcagacccctgaggtctgtgtgggaggaaaagccattccattaggtctggatcactgttgtaatggatgtagcctttgtgttaagagggtaggaagcagttaggcagctcctggtctgactttatctttttttttttttttccattttttattaggtatttaactcatttacatttccaatgctataccaaaagtcccccatatccacccacccccactcccctgcccacccactccccctttttggccctggaattcccctgtactggggcatataaagtttgcaagtccaatgggcctctctttccagtgatggccgactaggccatcttctgatacatatgcagctagagtcaagagctccggggtactggttagctcataatgttgttccacctatagggttgcagatccctttagctccttggctactttctctagctcctccattgggagccctatgatccatccattagctgactgtgagcatccacttctgtgtttgctgggccccggcatagtctcacaagagacagctacatctgcgtcctttcaataaaatcttgctagtgtatgcaatggtgtcagcgtttggatgctgattatggggtggatccctggctatggcagtctctacatggtccatcctttcatctcagctccaaactccgtctctgtaactccttccatgggtgttttgttcccaaatctaaggaggggcatagtgtccacacttcagtcttcattctccttgagtttcatgtgtttagcaaattatatcttatatcttgggtatcctaggtttggggctaatatccacttatcagtgaatacatattgtgtgagtttctttgtgaatgtgttacctcactcaggatgatgccctccaggtccatccatttggctaggaatttcataaattcattctttttaatagctgagtagtactccattgtgtagatgtaccacattttctgtatccattcctctgttgctgactttatcttaatagcaacctgttagaggtgggaaggttggttctagccaggaagctttaaaaaaaaaaaaaccaaaacaacaacaacaacaaaaaaaaaccgtggtgataattcaggcagcagagagaatagcaatgggtttaatgactttgaggccagggggcttttgttgttgttgttgtttatttcaattatatattacttttcctaacagaaaaatatatgatgggcatcactgaaagtcattatagcattatcaatataaattaagactgcctataagaacacccacatatagatccgtaatccatggtctgtctatcaccatagatatatggtgaactcataggtaagttagtgcaaaatagcaattcccttattaataattaactactataaactactttttcttccagatagcagatggtgcaagcataaactcatatttaggcggaagattttgtggttccagtaggcctgccccttttatttcttctggcaactttcttacagttcaatttgtctctgacataagtattcaaatgagaggatttaatgcaacatatacctttgtggacagtaagtattctgacagattatgaaatacatatgtccttatgcacagacaagaatgcatgcatattacatgtaaattaattacagttttagcggattattaaacacaagagctagattgcctgccctcagtttccctttctttgacaacgtctcactaagttgccaggctggccttgaattttatccttcagcctcaagcttgcatgaaggtaggattgcagccctgtgtcaccacgacatttactaaatccttaaaagaatattaacatgtttcctaggccagagaaagatgttaaagacagtatgtataattagagatgattaaaacatctacattattttctttctccctcttcagtgccttgtgggggaacatataatgcaacttcgatgcctcaaaacacatcatcacctcagttgtcaaacatcagacggccattttccacctgtacttgggtcattgaagctcccccacaccagcaggtccagataactgtgtggaaactgcagctgccctcacaagactgctcaaggagctccttagaacttcaggattcagaacaggtaaagatgccaggatggtggccgtcgtatttgcagacactgcaagtaatgaagccatgcctaaataaagtcctgttacttctagaattgttttttcagtaggagacaaaacctcccttgctgacatactaacccatttaaatgtagtcctgtcgcaagatgctttcaaacagtcctatagctaagaatcatctgggggtcttgttaaaaatgcacattcctgaaaatgtcaaactttgtggagctctttcatttactattgtgcatttaatgggtatgtaatgtgtcacaatggacacatgccatatgagcatagagatattgataggagaacaaccatctgtctcccagcatgaatagaatatatgtagtagccccaactttatgtagactgtctgaatgtgataaaactttgaaattaattggtttaacaactttatttgggacttccacaaactcacactgcaaagaaaaaaaaatcctatgactattattattgtgaaaattcttctctttgtcctggttcactttataaatgtggcctgactgacatgataggaagatttacgaatataatcatattctgatcgctttatagaaaggatgctagaagtgtgagccatgtaataaatcacttaccatcagaggtatcttcaaagatgcaaaataacccataatgaaggggaacaccatgcctataaacagtaggataaaaacttaaggatctgatttctctttaccattagtccagattgcaaaattaattcataaaaataaaaagatttctcagtgtaatgaatgtggttaaaaaaaaaaagaagtaaaaagacataagaatcaccccctaaaaaatgcacattcctaggcccccctgcagacaccgattgatctgcctaacatgcattaatcaatgtttgatgagcatctcttgtattctgccataatcccagagctctatgggccacacctggagaactacatctgtagctaacaggctatgtacaggtgaaatggagggacccatacagaacacaggaaaaacagctaagagaccatttcatgcctatctagtagggctacaattgcggcaaactgagagaataaaaaggggaaacagaagctttctgggctcaaagagataaatagtggaatcttagtttcccatggggaaagatggcacaacagctggtgtgagaaggacccagagatctgagcatgatcatctcctcaattggtgggcagaatggggagagcagtaaggcgaccaaagaaaatatttcaattcaggacccatagtctgagctcataccctgaaactattggagtctgcagttgggtaaacagttaacacacttactctcagaggccatatttgaatgcccaaggcctggcttaaatggagctccacctgtcaccttctgggttttcaaggccctccttgttataaagctgggctttctcactttttccaaatctctagctcagtgacaaaagtccagcttgactcgatgtggagggtcagagatgcacatgctggagaagagctgagtgccgcatagatcctagagaccaaggttactctaaggatcccgaggtggttgagaaacgaggttaagcgtcattcccctagcagtggttgcagcacagaattcctgtaccccaatggaagccccagtggaagaacttagagtgaagtgcaatgagaccctttcactcaaagcactttgagtttcctatcactttatgaataacgcaaatcagggcagattcctcattagggcacaaaaataacatgtacaggcagctgtggtacacaagagcagctggattggctgcaaatactacaattgaggatgtttagtgtgctgtctataaaaatactcaaggcctctaaagcttcagaacacatctgggacatagaaaattattatgagctaagacaccacagaagatagacgccataatgaacaacacagaagagcccaccccactgtcttgcactatgtttgcagagtaagctgtggagcaaaccttcatgagctgctggatacatgagagtcacataaggctacaaagttgaaaatcttgggatataaacactagggggaggctttagcaattcagttaaagtttaaaggctacatcagacaaacttaggacaaacttaggacaaaaacaatatggaaggctaagtaggtcaatgagacagagtaataactaaggagtctagaaacaaggctggagcatgtgccttcagacagagaccaagaactacatgtacttcagtcataagggtaatgtgacaggggctgttgttcaatgcctttgggatacttgcttgtacgtgtagaaattattaggcatttaccctgaacatttgacaggggatgaggactgccaaagtgctgctgaagagaataaggccattattacaggtaccaagtgccagggacaactgaaggggaagctcaccagacagagtacttccacctctgcctaacctaatagaactctagaacagggtaactagaggaagaactctagacctgtagggagttcacatgccctggctctgttcccacacacactttcactctgatatggctcaagagggagcagctttgatttctgtggagacgcgtctgctcataattttagcggaagctgggttccttatgtcccacacctctagggaggcaggacactgctcaattcccaggttaatgctaagtgtttcatggcatctgagactagagctgttgaagtcacatgctcagtacagtttactatctggtgtagctttactgtcctgaagccaaatctcatgcaacatggcttccatttcatttcagactaatggaaaccaagtgactcagttctgcggtgcaaactatacaaccttgcccgtgttctattcctcaggaagtaccgcagttgttgttttcaaatctgactttttaaacagaaactctcgagtgcatttcacctatgagattgcaggtgagcctaaaacctcatgtttatcggggaaaagcagctttgatgaccatcattgttggagataagtcttgtgaacagataagttgttgttaagataaactatctccatgtgaagtaaggttgaatttaactttttggaagctaagctttatcaaggtataacgtatataaagttcacagttcagtgacttttggtgtggtcacagtggtgggaatcactttaccttaggaaattattttgtaaatgaccacggtgccttgaaagaaattacttgatttcagtgaatggaagtgtgtccagaccatgtttcttcatgtaaggatggttttttaccttgatcaaaactacagcagaatttgatttgaacatagttacttttggttttggtttacaaaaaaaagaaaaaaaatgtaaaaagaaatatgtgaattgaatcagaaggaacagtttagcaatggaaaccctacacagctgatgtctgggagggtgagctttgggtctggaaaaggtccaactgtcaaccagcaactcttcttccatgtaagcagaagagttcagaagatgctggggtgctcttcaaaggggacttgtactcccactctttacgagggggcatgaacaagtcatgtcacggaagctgctgtggggggctgcccacatgaggaagccgctgagcctgcacgtgggggctgcgcatgcgcaagccgctacacagcaactgaacatgcgcagtgctcagcatctctcaggtccctgttctcttatacaaggcaagaggctggagccctttctgaatgttgctcagattcagtggactgtaaaaccactgttgttatcaagactactaaatatttggacctgcacattaactatgaatcctgtttttctctaagactgcaacagagaatacaaccaagcatttggcaatctaaagagtcctgggtggcctcagggctatgccaataacctggactgctccatcattctcagagccccgcagaaccacagaatttccctctttttttactggtttcagctggaagattcaagacaatgcatgaatgacttcttggaggtaatacatatttgcatataatttaaatggattacataagaacatggatggatcactaagaatttttttctcaagatattaattcaacatctctattttattaagctagtcagtattctttcatcctataaatgcgtactgagcagattccagctacagcactggaagcatggttgggtggcagtgtcaccgtctgtcatggcaccactcagcaatgggacagagatttttcaaaggaacatggatctgagttccaacctgcaggctgaatggaatgtcatgggcaagggccggttacctgcaaaggtgtttacacactgttccccgggcagtgagcaagcacagcatcttggctctgctaactgagtcgacagattccccgaggctctctccattggccttatggctctacaggaaagactctggaagatgtccacagcttccactcctgactcagagtttcctttcttctcaaactgcctctttgatcacatccttaaatgcttaatcactattttaactgagcatacgttggggtgcagtatgatattccaaacacatatataatatgtattaatcagttcagagtagttaatatttccatatttagttagctttattatatttattccaaatatgttctccagaaattttgtgggataaataacttccggattcacgctacccctttcctggtaacctttcttttctgtcagccttttttcctgctactttgtaatgctaacagatttcctgtctttctggtcaccagctcatctccagtggccttgtttctggcccgctgtcccctgtgtagaggactacctggaggagaatggagttccagtagatggtctctgcccatgtgttcagcttccacaggcttcctcttaccttactatgtaggaaagctcccatctcagattgaactgaatctgctgtcaaatggaatccttatcgagttgtgaattcccggggaaagctcgtgattcctcttggggtactttccatggcaggagatgagaaaagggaagaaatgaagacacagaagctgtgctgtttgtgctcgtcagggagttaagctcggatttacacgcttacacatccacaaaaccagatgtttgtataaaacagatgtgtgcacaaacaaaaagagagggatgtagaaaagggctagagtcccttgctaaccccgagtcatagtcttaatccatccctaactcaaggtactagttactggccccacttaatcttggccgtttgtcatctggatgctggaaagtgaagacttactttttaacattggatggtgacagccacaccagccagacatcctccctctttccacagaatgatgggaagttctgttacattagcagagagaggaagctactacacaggcctcagaaacacatctgcctctggagctccaggagagactctgaagggagccctggtgttctattactttagctatggtgggaatagaagtcttccatgaggattctagtgcatttctagcagggagggcatggctaggccctacctgtgaatatgcctccaactcccctctccaatgtacatgcttctgcataattcatgagctatgcctcatccttctcagaaaagtgaatgtggtaagctctaagcagtggatctctcctcccccgatctcgcagaagtgatttaagagaggatccccaaggaaagaaactcaatgttgagagtatggggggcgggagcgggtcaagccttgtagcgttcttaaatgtgtcagctatcccacgtactgggagggaactgaccagtctgtcctagccagagatgttttgtttaaacatttaagagaagaaccaagagtgcatcacttgccattgcctaggtatagaaagagcctcgccagctcagatgcccaagtaaatgtgcacttctgcagactgcagtgactctaaaggctagccagattctggactatggaacgatgaagggaagtggggtagcttctcacattgaacatgtacacgctaacagcagctcttcatgcaggtctacagggtgaggaatattataggcacatggagccatttacttttcccacaaggaaaagatttgtttttgatcttcggtgttctttgttcattgtggccactttaagctttccagtgggaagcatccttcccccggcccccactgtgatcccaggaataaagtacaactggaaacaggccaaacagtggtgccccttcccccttgaaagtccactgtgcattcctcaaaatgtgtgcacacataacactctgtaggatcatggcaccggctagtatatcacaagaatgtcagtatttctgaggctatactttatcagatatttctaaatcccaatgcaaatggcgagtgctgtaaattcttatatgtcttcatctacaaatacttgaatatgtaaagccccatttcctattctggagtctgagtggcctgacaagaataatgggagtctcaggctagcttgggctagcccaagctagcccaagctagcccgagctaagaaggtgatactgtctcagaaaacaaaaccaaaacaaacctactggatttacctcacgtgttagtgatgagctgaaacagaggtgatcggatgggtaaccaatggtgggttttcacaggtaagaaatggcagcagcagcagttcaccactgcttggcaagtactgcagcaacctgctgcccaaccccatcttctctcagagcaatgaactgtatctgcacttccacagcgatgactcagacacccaccatggatatgaaattatctgggcctcctctcctactggtaagatgctcactctgagggaagctcctgtgggctgatggggtgtccaccacaggaaataacattacaggaaataggaatgcggccttcagcacattaggtctgcgcctgatgattttctgttaaagacgcagatttcttaacaatgagagtactgaattttcaaaatcctacaattatttatcatttctttgatgtaaaagactgaaattttcatataaaaggtctgacaatgtaaacattccatgtaaacattatttttgttcttcggatggaatacccaggagttctctttgagaattcaggaaatgaaatcacaggacaagtcagggccaaatctgtgtgtgtgcaggcagctggctctatccacaatgagcagcgggctgcacatgtgaccgtgtgtatgcacgtctcatggtatgtgtctatgagaagctcaatccttcatggttcctatcatttggtggcagtcctgtgtcgtaattgctacttcagggtgataaatgtcttcttgaatttttggtccactgttcattaaatagcagggaatttaagtcacatgaacacatttagatcgagaaaagagggatacctccaatacttcaattttataatatctgggaacctacaaaataaaaatcatgaaaggaatcttttaagtatattaagggataagagagggtcccattcaataatcacagaaaacaaaatctacacacggaaggaagcccagtcattaacttccctgattggtgaaaaggaggaaccgatgaatgcattggccatggccgcaggcctgcacatgagggagtgaagccgtaagccactctgacctacatagtaagaactgatcttgaagagagagggagagagagagagggagagagaaggagagaaaactccatgctccaggaaacatggctaactctatctttacacgggaagttggttacttgaggagagactttgatcttgggacccataggcaccctgttgctattacacaccagagcccccacagaaaggtgaccctgctcaaggcattgtaccagatttagaagttgagaaggtcttagaactgctagagtgggcctgatgagttttgttgtagcatctaagctgtgacgtcagacgtcagtcgtcagtctgggtgtgccacagaatgtgagttgattttcgcagtcattaatattttctatgctcagggagtctgctgtaccctcaaagcatgcagatggagacttttctcttggggtaactattgtattgttttccagtttgttcctagcttgaggttagcaaagaatagtcccgggggaattaccttgggtcacagccactgggaaaggactatccagtggggatgggcccggaggggctctcaaccaagaggagggtttccatgttgggcgctttctacctgtgtgggaaagcaagctggatgctaaatggaacctttgtccattctttctttgcaggctgtggagggactcttttgggcaacgaaggtatattagccaaccctggctttcctgacagctacccaaacaacactcattgtgaatggaccatcgttgctccttctggaaggcctctctctgttgggtttccctttctcagtatcgactctccaggtggctgtgaccagaactacctcatactcttcaatggtccagatgccaactcaccaccctttggaccgttctgtggcatcgtgagtaaacaaacaagctattttacatttccacatgtaaaatttcacatgtgattttttaaacagtgacggtaacggtaactacaggcacatgcaaaccaaaaaaagaaaaaaaaaagttgtaattcagtggctttctattttgggagtatgagcaccatctagtggcagatatgtcatattacagttaccactaaaagctacagaatcaaaccttaccagggagttagggcactgtttttaatttttctcctctttattcgcacggccctttgaaccaaacaaggcaagaattatatcactggatgtctagagaattaaaaaaatataaaacttattttaaagcttgtaagattttatttttagaaacattagaaagtacatcgtaagtttaaaagtttgagaattctatgtattcaccacttacctttctttgaatacatatacacatttgcatatttgagcacacgtattttcatatctgaatgcatacacatatctgcatcttttaaactgtttataacttaccgatcctccactaacaccttcccacattaatgaagaaacttttttgatgtattatttcccatgtacctgagtgcagcctggattactaaacaaagcctctgggtttcgaaagtaacttctccccaactatatccaccattacagctctggggaacatatcttaatatgggaaaatcagttacatggggaaagaatttgatcttgggaccagtaggcaccctgtttgctattatatgcaggataaaatgagagataactttgttatctttgtatggctcctgtgtgtagatttgagtaccttccaagcagtcagatctatttgaagccacagttggcagcctgtgctgcaggaagagttcactctggactttgtagatgaaggacagaggcgctggaaggtggatgactccctcttgtagctcagtgtcatctcaaatccaaggagataatggatacgctgtatccattatcaaagtatactcctttccatatgtaatgagttttccatttattttattaacatttcacaatgttaacctatcatataaagcataagaataaaagaaataagaactaaacgctaaggtaaagcgccagcagcctggcggttgtgtgtgggtctgcatgtgctaacaccagcagcctggctggggtggtgtgcatgcgctgacaccagcagcctggctggggtggtgtgctttatggcacagcactgatgcgtgccattgttcacattagttcagatacacagaagataaaagaccagtgaggcccaccattacctccccaaccatcgccttgcagccttctgtctctggaggcattctgttgtattaattaatgcactaattattggtgtgtcacagttagaaatatatgttgcttcactcttagaacttctatagagtttctataggtaacactttaagtatgctgatatttctagaaatatgtttgatttaaaaaataacctttcttcccctcctcctcaattgcaggacactgtggtagcaccctttcatgcttcatcaaatcgggtcttcataagattccatgcggagtatgcaaccgtttcttcaggatttgaaataatgtggagtagctgaatcgggagagctgtgtgtaacccctctggctctgccccgcgccgtcagacgcaacccgcaaccctgcccagaactctgtggttctcatccccatctctgcccacgccatcaaacacggactgagcttctatggcctttacaagagaaagtgtatgaccaatttttttacatttggtgttctgaaggcagagcctggtggtgttccactcaggtgtacatgccatccttactggatgcaccatttagtggagaccttttaaaacgttctttaaagggtagaaattatcctggcacactgatgtacatttctaaaagttggtgatacaaatagctgtatggtttccactatacaaaagtcaaagtacgggtaataaacatttcttaaaacca

SEQ ID NO: 69 - DNA, 235505 bp, Homo sapiens; identical to SEQ ID NO: 23

SEQ ID NO: 70 - DNA, 81365 bp, Human
ctcctccccgaggtgccggtggccccgccgccactccctccggctccctccctcccgccgcggcgcgcatctcattccagccctcattccgcgcattccagcgtcctcctcgcacactcgaggccagggggcgggagggccgcagctccggcgccgccgcgtcccgccaggtgagaggcgcccgcgcccgccgcacccgccggcgccctcacgggccgcgcgccccacgccgccgcagccgaccgctcgcgccgcgtgctcggctgctcttttctttccgccgcccgcgttcccgccttggacctctgcgctccgacgcgctccgtcccgacctctggcttccctccgcgctccggcgctgctcgctgcccctctcccgcttccctcctgtccgccccgcgctcccctcctcgctcccggttgactcactcctccaggaatagggatccccgtgttttcccgtcagtcccattctgggaaaactcctccctccgcgcgctccgctccgctccgctgggcgcaccggggccggtcggcgcggggtgggcttggccccgcggccccgccttcactgcgccgcccgtcggccccggccggagcccggctctgcgcgctgacgccctgtcgtccccgcagaacgatcgccgcggccggaagagttggcgctcggggcggactccttggaactggcttagcgcacccatcccaccttcccgcaccctgggaccggtaaggctggggcgcggggacttggtaggactttgccggagggcaggagtctgcgcggtgcgtgcggagctccctcccgggacgagactgggaagagcgaggcacgtggaggcggcgcgactgaggctgctggaggcgaagcggctccaggggcgggtaaggggggtggacactcgggactttgggggaaagggaggccggtgtggaaaggaccggagaggcagaaccgagagcatcggcaacagaagagacccagcacccatgcctcttttctgctgggcccttttcgagcctggaagggagagacctggaggtaagcggactgcctgttttaagtgcaaaggcgatgcgaaagtcgggggacccctgcaaaaggtcctacacctcagggcttgggaagctgctgtgtttcctgatggggactagtggatcgatccagggagcagaactttcaaaccccaaagtgaacatttcccccgttgtgctgaggcacttgaggccccgcggactgactgcgtctgtgctgagtctgtgtgacacctgactgcgagtccccctcgctttgagtctctgtgtgggtgatgtctgttcacgtgtggctcaccttggcttccagtgggcgtatttgtttgtgttgaacgtgagtgacagagtgtgtgtatatgtctgcgtgagaaggggctgtctgaaagtgagtatctctgagtaggtgtgtgatgccacgtctcttgagtatgtgtttctcttcgaggatgttggttctggctaggactgttcttcctccctacatagccgtgggcaagagtcagtgtctctggttgcctgagtgcagggataatttgactgtggttttggagtgtgtggcctccaggctccgtttcccctggaccgggcagagctggaaggaagctggctccacctgcctcttggagccaggaggctgactttctcagggcgagggtcttgtgcttgcctggaataggtcaaaaagctggtaggaggctgaaggaagttgagatctttgcctttgggggatgggatgggcgggtgagatttgggaaggtttgtcggggtggatccccgggaaaaggagacagttttgaatctggagacttgtgtaaatagtgcttttaagttgccctcaaggacaaacagggaggtataccagcctgaactacttttcctggtttaactctcctcggagctgaccaggtaacccagtagaagaatccctcattctttccaacttgccagacactcagcacttcctttgagaagaggaatgagtagcttgttgcatgagggcttcaacgtggatatcatgtgtagggcttcttggaaggaaggagccagaaactgtctcgggggttgggggttctcgtccttgctcctccatccatcctgaggatgtggatgttcttgtgggaaacacctcaccctctcacctcttcggcctggtgtgcgactggtctaaaagcagcactgatggagtggaaagggcacaggtttggggtcaggcagaccagggtacaaatcctgagtctctcactacctttaaggctctcaggctgtttcctggtgggtaatacgagcggagcttttctgtccagaaagtttcttgtgaaaagtcgatgtctgcagagcccccacccagcagcacagtgcctggcacatcccatggactccataggatagctgttgtatccagtgtttccttcgcttatttcagtaagaacccctttttcctagggattagtgttttttgaattagtgtttctctgagcaccatttgagaaaccttgccctgtctatcatgtttatttagcaaacatgaatcgagcatttactgtgagccaggccctacgctgtgttccgcgtccttaggaatccagggtcctagtggcccaggtcaggagggagggggacagacagggctttgtcaccagagaacagagtgccagcttctattttctgattccagttttgccttggccccagggtgagcttgctgaacattattagataccctaatgtcagcatctaagtcccccattttattttattttactttatttttattttattttattttatttatttttgagacggagtctcgctctgtcgcctaggcagtagtacagtggcatgatcttggctcactgcaacctccgcctcctgggttcaagcgattctcctgcctcagcctcccggccggctagtttcatatatatatatttatatatatttatttatatatataaatataaatatataaatatatatataaatataaatatatatatatattttttgagatggagtttcgctcttgttgcctaggctggagtgcgatggtgcgatctcggctcaccacaacctctgcctcccgggttcaagcgattctcctgcctcagcctcccaagtagctagaattataggcgtgcgccaccgtgccccactaattttgtatttttagtggagacggagtttctccatgttggtcaggctggtctccaactcccaacctcaggtgatctgcccaccttggcctcctaaagtgctgagattataggcatgagccaccactcccagccgttttttgtatttttagtagaggcgggatttcgccatgtttgccatgctggtcttgaactcctgacctcaggtgatccgcctcggcctcccaaagtgctgggattacaggcgtgagccactgcgcctggcctaagtctcccattttaaagatggggaaactgatgctcctagagggacagtaacttgcttaatgccgcaaccctggtgagtggcagagcagggattagaacctatgctctccccttggcgttctgtctcctgccctgtggattgcagtgcttgtacaccccctactccccctagccgccttcatccaacaggcgcggaagctggagcagactgacttgggccatgccttgtcgctcagataaggttggtaggaggcagaaatactctgctccgacctggcagaaagcacatagctgttctggggaaggagccatctcactgtagaatctgtggagtcgggaaggggccctcgggtctttaaaacacaccctcctctccccttgatgagccggcaggtgaaggttctccctatctttttagatctcctgggttgcaaatgtcacaacctcctttgatttccactctggagtcttgccccggtgactgtcacaaagcaatgcctgttgccaaacctgtggctcctccttctccttcccagtggaagtggaggacgttggtccccagctttggaccttgcctttcctgcagttgaggtcagtccagtggcagttggaaattcagggcttgtgagggtggctttaccttgcctgtcttcctttgcccccatgaccctttgttggccggggttggacgacagctccctttaaagctctgaaattggagctgaacagctgctgtccagtaaaggggggtgagggggctgtcagcagccaggagggcccaggtggaggtgggggcagggctttgtcactggggagaacacggtctccagctcctatcttctaattccacttttgcctggacgctttctgagatgacggttcttcccttgcttttggtttttcccgctactatctgggagattctaatcacacctgtgtgatctggccctggggcccttagctggtggggactggatatttgggaaaatttccactagaactcaggtctccaagatctatgcccacgtcctcctgcatttaatacaggggggctcctggaagggccagaggatgggccaggctccctgtagcgggggctggctccttggcttggtgtgggcaggcgggcccccatgggtggggactctgcttcctttgacccaaacttcatgggaacaatagacttcagaggagtcaccaggggcaggaaatgggaactgtgcagagccaggggtgaccctcctgggggatgggattgcatatccggtagagggttgggggcagtgcagagggcgctggggaggggctgatgacacatagggtgggcctctggggtggggccctcctccaaagggggccgttgactcagtgtgaagctagagctccgtgccggttctgtgctgagctttcggctcttactagcacagggctcgtgtttgccagcctccgctcgtgccacgctcgcccctgccaggacttggtcttccccttcccctcaagcccctgagatgtctttgcgaatcatcctggctgggataaaaggctggtgttgttgctccctggctggtctccaccttggctgtgagccttgggcagttgtggctggaacggcgatcttgggttgtgggcaaagctctggacagggagtccccaggctggggtcgctggacaacgtgagggatttctttctttctttttttttttttttgagacggagttttgcttttgttgcccaggctggagtgcagtgctgcaatcttggcacaccacaacgtctgcctcctggattcaagcgattctcctgcctcagcctcctgagtagctgggattacaggtgcctgccaccacacctggctaatttttttttttttttttttgtatttttaacagagacagggtatttccatgttggccaggctggtctcgaactcccaacctcaggtgatccacccgcctcggcctcccagagtgctgggattacaggcgtgaaccaccgtgcgcctggccatgggggatttctttagccgcaggcagagcgagacagtgggtggaacgttctggaggcggaggactcttgtcttgcctccatctttgtaagggtcgaccagactttgtgaggaggccacagcttaccctgagagaattgtgagtcaggccacacaagctgctttgcctgagttcaggttgccggattctcacagataggctttggggtcccaagagaaggtgtaggagtgaccccagaaccactgccaggacctggaaggagggtaggagtaggagagacaacacatgctgtcttgatttgtttcttcaaggaagcaagatggggaccctggaaatggcagactcctagaattgattccttgcccaattcttggttagattttgttttttaatgattttttattttttgagacagagactcactttgtcacccgggctggagttcagtggtgcaatcatggctcactccttgaactcctgggctcaagcaatcctcattgccttaacctgagtagctgggactacaggtatacgccaccacacctggctaatttgtaaagtttttttgtggaggtagggtctcgctttgttgtccaggcagaactcaaactcctgggctcaagcaatcctcctaccttggcctcccaaagtgctagaactgcagatgtgagccatcataccctgccaatttaaaattttctagtagccaccttaaaaaaaaaaagtgaagttaatgttggtgttttcttaaaccctagtgttatcaaaaataatttcagtgtaataatttttttttgagacggagtctcgctctttcgcccaggctggagggcagtggggtgatcttggctcactgcaagctccgcctcccgggttcactccattctcctgcctcagcctccccagtagctgggactacaggcacccgccacctaatttttttgtattttttagtagagacggggtttcaccatgttagccaggatggtcttgatctctctaccttgtgatccacccatctcggcctcccaaagtgctgggattacaggcgtgagccaccgcgcccggccataaatttttttaaattatcattattattattatcgtagacagtgtcttgctctgtcacccaggatggagtgcagtgatgcggtcatggcttatgcagccttgacctcccaggatcaagcaatcctcccacctcagcctcctcagtagctgggactgcaggtgtacacggttgcactcagcctaggttagatttttgaacaaaaatatgtggagagtgtgaaaatgaagtgagatacctagtagccaacctgggttcactctaccaagtcttggagaaaacaactctaacttgggtggaggaatgttcagtaagccttttcagtctaatgatcttcttggtacaagagaaagcagtgtggtctggctgatacagcagggagatggatgtgtgactgcttgacccactacgctggatgctgactcctaactcctgagcttgtgttactgtgaagaggtccccgtgatgtgccgcagggctgtctttggcttagtcctctatgttttccatagatacgagcctctcccaggagcctgtgtggcctgtgtcttctgtttctcatttctttttctttctttttttttttttgagatgggtcttgctctgtcaccaggctggagtgcagtggcgtgatcttggctcactgcaacctctgcctcctgggttcaagcaattctcatgcctcagcctcccaagtagctgggattacaagcacacgccaccatgcccagctaatttttttgtatttttagtagaaacagggtttcaccatattggtcagactggtttcgaactcctgaccttgtgatctgcccgccttgacctcccagagtgttggtattacaggtgtgagccaccatgcccggcgtatttcttttttttgagatggagtctcgccctattgcctaggccggagtacagtggtgcgatctcggctcactgcaacctccgcctcctgggttcaagcgattctcctgcctcagcttcctgagtagctgggattacaggcacctgccaccacgcctggctaatttttgtatttttagtagaaatgtggtttcaccatgctggccaggctggtcttgaactcccgacctcaggcgatccacctgccttggcctcccaaagtgctgggattacaggagtgaaccaccgcacctgaccctgtttctcgtttttatgggcgttgagggtagcaaacattggctgatagaaccagggttcaaaatcatctcagttgactggaatgctgccattaagtagaaagatgaagtttaaaaatatttctctcttaaaattaatatatgtacattgtaggaaccctggaaaataaagaaaggcataaaggaaaaaaatgatacataatactataattcgggtgggctggtatttcggtgaatgtccttccaaatttgtgttcatgcaaatctatatattttaacataattgcaattatactctatcccgtttttttccctactgaatgctatctaatgggtaatagtgcatgtcataaaaaatacttaaaaccataattttaaggatccaagtaacattgcattctatgactatactatatttaactatgccctactgactttaaaacattgtttttagtttttagcttttaaaaattacttgacattgagcaatgttgaacatatacttatctcaagaagaaatgtaataggtctaagtgtaacatcctgcatttaagttcaaagcatcaattatgtaagtctagaatagagtgggacttactcttcattcatgttgagggaaaaggcttggggttttgggctgaaaaacgaaggaagagggaaatgaacattttaatgcctgttaggtgctagaccattattctagacatttctgccttcatcatctcatttcatcctctcagccctgtgagaaaggtttggtttgtttttgttttgtttttcaacctctactttacagaggggacactgtagaagttatactgcagttggagtttggacccaggtcaatctgactctcaaactgccccattaaaccataagcctgtgtgggccagtgctgtggtaaggtctgtgtcaagggaaacctttactcactaagctctgtgaccctctggccacattggaagccacatctggttttggaaagtttatatatcctgagctgttaagtattgagctcgccatttttgtgggtcttcctctacccccaaccagtgatctgatctcaaacatgtgggtcttttttttttttttttttttgagacggagtttcgctcttgttgctcaggttggagtgcaatggcgtgatctcgactcaccgcagcctccaccttccgggttcaagcgattctcctgccacagcctcctgagtagctggaattacgggcatttgccaccatgcctggctaattttgtatttttagtaaagatagggtttttccatgttggccaggctggtctcgaactcccgacctcaggtgatctgcccacctcggcctcccaaagtgctgggattacaggtgtgagccaccgcgcccggcctttttttttttttttttttttttttttgtgagacagggtcttaactctgtcacccaggctagagtgcagcgttgcaatcacagctcactgtggcctcaacctcccgcgcccaagtgatcctcccacctcagctttctcagctactcaggtctcagtagctgggaccacaggtgatgccatgcccgcctaacattttttttgttttaatttttatttttcatagagacaggatcttgctgtgtttcccaggctggtgttttttttgttttgttttgttttaatagataggatcttgctctgttgcccaggctggagtgcagtggtgtgatcatagctcactgtagcctcaaactcctgcactcagatggtcctcctgcctcagtctcccaagtagctgggatgacaggtttgtgccaccatgccctgccaatttttaaaactttttgtagaaacaaggtcttgctatctttattttgcccaggctggtcttaaactcctcgcctcaagcgatcctccagcttcagcctcccaaagtgctgggattacaggtatgagccactgtgctgggcctgtgagtgtcttaacagaggctggatgaggacttagaacctgcccagcatctgggtgctgtcatttctcatttctagaaggtaggcaccctttacagcagtagcaggttaggtccatctgacctgaagtctattacttcattatgtaaaaccacataaaactagtgggccctctgtatctgtaggttccacatggattcgacccaccctggatcgacagtgttcaggggaaaacattccacagagttccagaaagcaaaacttgaatttgctgctcactgaatgctgcattgaatccatgcaaatgaagtgatgtgcatgcgttgtgttaggtatgataagttctctagaaatgatttaaagcacatgggaggatgtgcgtaagttatgtgcaaacactgtaccgttttatatgagggacttgagcatcctcgggtttcagtatccttagaggccttggaaccgatcacccacagataccaaaggactactgtacatagagtttcattatgtagaacttactagggatgctttggaggagtctctgccctgcatgggaaaggactaggtcacctccagggccactgcttcctcgaagattttgtggtcctgggcctcagtttctccacatatcagcatgcggggattccactagatgaaacacttcgggattcctgctacagggaggtagtacagcgaagctgcacctggagttggaggcaaggcttgggacgagggtgcagtgtctgagcagtcagaggaagcagaatggggagatgagggaattattgcgtggctgccatcgtctttgtccaaacaagcacggtgttaggaacaggcggaatctgggtcttgccctgaggctggagggtggggaagatgaccccccacaaccccagagagcagtggctatcagtgcagactccagagtggtgctgtccaatagaaatactatgtaagcctaggagttacatttaaaaagtaaaaagagctgggtgtggtggcttttgcccatggtcccagttactcaggaggctgaggcgggagagttgcttgagcccaggggtttgagaccagcctgggcaacatagcgagaaccctgcctctaaaaaaaagaaaggaaaacttaactggtaaaatgcattgtaataatatattctttaacctatgactacaatattatcattttaacgtaatcaatagtaaaaagtatcaatgagatagtttaccttctttccacacaaagcgctagaaccgtagtgtgtattgtacacttaacaacacgtctcaatttggactaacaacgtttcttgtgttcagtaaccacgtggggcgagtggtcgtggttggcacagtgtggctttccagccagcccgcctgggtttgaatctctgttctgccacttaacacctgggtgggataataaggttaatagaaccaacctcatacggtgtatgtgaagactaaatgagttaatatctgtaaagtgcttagttctttccccggcacataataaccactgtgtaagtgtttgtcaaataaatgacctataaatggttcttaaaaactgtcgaagctggaatttgtaagaggtagggggtcgatgatgtgtgtggaaaaacccaatcgtagagtggccctgtggagttactgatagtccacgtttgtactgtggtagttctccataatgaaatggacttcagatccgaagatcctaatctactctttgctgtgaagagcacctgccttctggaagtgagaaatgacagcatcctgatgacaagacaggttcccatccctcggcaggtgcatcctgagcatctgtctgcctggggcttgaactgtgccgggtggcatgcaggaagcaaaagcatcctcggaaatgctccgtcgtaaattgcatgacctcatgttggaatgagaggtggggtcacttccagcacttggaggttgaagcaatagttgctgcttatgcaagagaagaagtaagctgtaccagtgcctcccatacctcctcagggcactgccagcccagcacagccagctctcctctcttggcatcagctccctccgactgcacctgccctcacccaatccacagcagccacagcacccacggtgtgcccggcactgtgctaggtgcagcgggagtatggaacggaagccctggttcctgtcctcatggaacttgcagggaaatggactgtgaagctagcagtaacatactgcaagacgaaagaacgtgcacaagcagggtctgtggcagtgcctggtaaaggatgattgattctgtcccaagaggaggaggcagttgagctggctttgagagtgggtggggttctgacaagcgtgtatatgtgtaagagagagggaagcagacagagaggaagagaaacagaactatccttgagaagacagagaaaatgtgatttgagggctattgtcatgaagtgatgagaggaggggaggtaagtgggttttgttttttgcgggttttatttttatttttattttattttattttatcttatttatttttttgacagagtctcgctctgtcgcccaggctggagtgctgtggtgcgatctcggctcactgcaagctccgcctcccgggttcatgccattctcccgcctcagcctcctgagtagctgggactacaggcaccccccaccacacctggctaattttttgtatttttagtagagacggggtttcaccatgttagccaggatggtctcgatctcctgacctcatgatctgcccgccacggcctcccaaagtgctgggattacaggcatgagccaccccgcctggctgtgggttttatttttatatccttttttttttctttctttcttttttttttttttttgaggtgaagtttcactctatcacccaggctggagtgcagtggcgcgatcacagctcactgcaacctccgcctcccgggttcaagtgattctcctgcctcagcctcccaaatagttgagattacaggcacgtgtcatgatgcccggctattttttgcattttcagtagggatggggttttgccatgttggtcaggctggtctcgaactcctgacctcaagtgatcccctggcttcagcctcccaaagtgctgggattacaggcgtgagccacagagtctcactctgccacccaggctggagtgtggtggtgtgatcacagctcccttcagccttgagctcctgggttcaagcaatcctcctgcctcagcctcctgagtagctgggaccacagacatgtgccaccacacctggctaatttttaaaacattatttctagagataggatctcactgtgttgcccaggctggtctcaaactcctgggctcaagccatcctcccgtctcggaccctcaaagtgcttggattacgggtgtgagccaccatacccggccaagtgggttttatgaacagggtgggtttgagctaggccctctgggcaggataagaaggtcttattttacgttcattttttacgtttatttagactcaggcagcatgtctctttttttttttttttttttttttttgagacagagttttgcttttgttgcccaggctggagtgcaatggtgcaatctcggctcactgcaacctccgcctcctgggttcaagtaattctcctgcctcagcctcccaagtagctgggattacaggcatgcgccaccatactccgctaattttttgtatttttagtagagacagggtttctccatgttggtcaggttggtctcgaactcctgacctcaggtgatccgcccgcctcggcctcccaaagtgctgggattacaggcgtgagccaccgcgcctgtagaaaaacatctcatcctataaaatagagtgaatctttccctaaatttatttttaacatacatacagcaaaatacagtgtttttggtaagtagtagatgttgacaaatgcacagaatgtgttttcaccgccaccatcaaggtaaagactgttccatcccccaaacgattccatccatgcattggccccttggaggtcatccctcccccttcccctcttggcatcccctggccacgctgatctgttcattcctataattttgcctttcaagaatgtctcacaaatggaatcatgcagttacatagctctttgggtctttgcttctttcactcagcaaggtcatagctcactgcagccttgaccacccaggctcaagtgtccctcccacctcagcctcttgagtagtggagaccacaggcacacgccaccacgcccggctcatttttgtactttttgtagagatgaggtttcgccatgttgcctaggctggtcttgaactcctggctcaagcagtccacccgcctcgcctcccacagttgtgggtgtgtgccaccatgcccagctgttgttctgagagttctttcatattctggatacaggttctttgtcaggacagtcagatatgtgatttacagatgtttggaggaaattagtttatggagaaaatcttcacaagatgatgggagtgaggaactctgaaagtgaggtgagagtttggtgtcctgagctgtggcctttctcacagtgcaagatgggaccaggaatgaggagtggggtacacctagagaatgacatgaaaaagaggagtcacggggccttccaagaagctctgttcctggcgtagagcatggttcagaatgagaggcacaggtgggaattttggtttgccgggcatccttcctgcctggcgggctgcacctggtctgcagctaatggcctgctgggtcaggccgggctggccccatccagaaaaacaaatgttcatgtccagcctgcatttcaaccacttccatggccttgtttccaaaccggatgatcgtgccttctggaatgggaggcgcggtaactggcaggcctgcaggagtaaggtgctgggtgtgtggctggtgcaagacagaatcagtgggggtgagttttctgggtcagggtgggtcctctgggatggtaacctcagcctagggtctgagtgaaggcttccagctattgttttttcttttttcttttttctgagacggagtctcactctgtcgcccagaccggagtgtagtgtcacgatcttggctcactgcagcctctgtctcccaggttttcaaggtgccttagcctcccgagtagctggaattacaggcttgagccaccacgcctggctaatttttgtatttttagtagagatgggagtctcgccatgttggccaggttggtctcgaactgttgacctcaggtgatccacctgcctcggcctcccaaagtgctgggattacaggcgtaagccaccgtgcccggccagctttgagctgttaacagaatgtctgaaacatcataatcttccttcctatccctgaccaggcagggtggctctgggacagaagacttacatgaaaaatgaccaaggccaggatggatgccgcctcccacctcttgtccaagctcattctaaccccgcctgctcctatgtcctcagagccatggcccagtccagaggctcgagtcttcattcttccccctgggggtgcagatgcttttccagaggtgcttagggcgtagggctggagagtagggcagagctggagtcctactttcccggagctcctagtgccccactgcctccaggatgtcctgtggctccctgaggctctgggtcctggaaggcattccccggtgtggagactccctcttctgcctggctcctccttctcccagggcagggcgtgcaccgaggccccaccccagatgcccgtgctgcttggacacctggtttgggctgaccctcgggttctgacagggtgggatcctcctgcctgactttgagagcagctgattgagggcaaacccacccccgaggctgaggaaacaagtgtgctggctttgacggaattccagggcaagtgcttctgttagtcactcccgggctaaatctattaatattttcagatctgcattttcctaggacacgcctccttaaagtgaagccaattggtttggttgagtacttttgcctctcaagtactgtattttcataatttttgctttttgctttatttcacttttaaaattttgtatttatttattttttagtatccctgtcatggcaacttttgctttattctagaaccctgaagaaaggccccgaggagaaaaagtctctcaacccttaaaacaaacaaacaaaaaaagactataattttgagtagtttggggtttatagaaaacttgagcagaaagtagacttcccgtagatacattcttgccccgcccccagtcagtttctcctagtcttaacatcttgcatttgttgcaattgatgtacatttgttgcaattaatgagtcaatatcggcacattattattattattattattattattattattattattattattactagagatggagtcttgctcttgttgcccaggctggggtgcaatggtgtgatctcggctcatggcaacctctgcctcccagattcaagcaattttcctgcctcagcctctcaagtagctgggattacaggcatgcgccaccacacccagctaattttgtatttttagtagagacagggtttccccatgttggtcaggctggtcttgaactcctgacctcaggtgatctgcccacctcggcctcccaaagtgctgggattacaggcatgagccaccgtgcccagccagcacattattagagtccatagttcacattagggtcccttcttggtgttgtccactctgggttttggcacatgggtaataatgtgtacccaccattacagtatcatgcagaatagcatcaccgttccccaaatcctccaggttccgtttattcatccctccttcccacttctggcaaccattgatcttttgactgtccctgtagttttgccttttctagaatgtcatatggttggaatcatacactatgtggccttttcagattggcgtctctcactaagtaatacgcatttgagtttcctccatgtcttttcatagctcatttttttttttttttgagacaaagtcttgctctgtcacccaggctggagtgcagtggcatgatcttggctcactgcaacttctgcctcctgggttcaagtgattctcctgcctcagcctcccgagtagctgggactacaggcacgtgccaccatgcccggctaatttttatatttttagtagacacaccattttgtgttccaccaagacgccgggctggtcttgaattcctgacctcagatgatctgcccacctcggcctcccaaagtgctgggattacaggcgtgaacctccacacctggccatctcatttctttttttttttttctgaatagtattacaccctgccccctcccaaccttttgtttttgcaaatggaggcactgaggcccagagaggggaagtgactggctcaagaggcaccacgaacctgtggcaaagctgcgcttggaggctaatttgccttcctctgggtacctgtttccaggggcctctgggccgggcgctgttctggaactaaacctgtatcatcacagctttgtccagaggctgaggggaggccagggggcaaggcctctgttcaccacttgccttgacccacttcctgcatgtgttgggtggggcctgcagatacccacgcccctgacgccgaaggggttgggggtggggttcccagcttccacctccctgagagctgaggagatgggatgctgggtccaggctgagagctgaggagatgggatgctgggtccaggcaagtactcgccaccccattgccgcccgggcctgggggctgggtgggaagagactgcttgggttgggcctgggctggggcctgcagcatttaggaatcttatctccctctgttgctctctgagctgcccctcccactggagactcctcccagctggcctgcatcccaggccatctccatttacttaatttacctcccctcttgctagcctgcaggcctcctgctccttcctctctgtcccgccctccatcatccctcctgatgactacagggcaatgaccgtgaatcacgtgcaaggagcccctttttgggccaggctctgtgctcatggacatgatggaattcaatcctcacagccgttatttggggagattgagattgcactggtgcctcttcagtggttgggaggacactgaggattagagtagcttgctcaggactcccaggtccctgtgaggctgggccaggatctgagctcaggcgtcttgagtccagagcccaaacgctaaatctctgccccaggcgtctctctctctctttctctttctccccttcctgctctctctccctttcccccttcccttctttttcctctctcttttgaccaggcattgctcaaggggtccagctctctgacttttgttccaacatctccttagcctgggaaggattgtggggcctccccccctctcacctgctccccgttccccatcctgtcctgaagccaggtgtgatgaaggcctcacaccaaaggatggccgggaaggtgctgccgtgcattgccttgcaggggctttacttgcttttctcaatcctcagtggctctgcaggcaggaatgctcatccccatttgacaggtgatgaaacagaagctttggggaggttcagtaagttgctgaacagctgtgcaacgtagctggtgagaggcaggtttcactcaggtcataggactctgaggcgtctttaacatgtcccggacttcacgtggcctttcccgagaacttgttgcatttcaggagaggaaggggcactgctcagcaagaggaaggcactccagtggtgggagctcaggccctgggacacctaggttttcttggtcttgttttctgagaagggcccttttttggcctccggcaggccctggcccttccgaaatcacaatgggatctgtttgtttctaactgagtacacagcctggcccggcccagcccaaccaaatccatttctctgctgggttctttccttctccaccaatccctttccttccatccctcgggactcacctgcctgtgacctggggactctcctgtccttctcttttcttttccagctgtaaccaggccctttcctttgctcctgtatttcgggcccaggtcccctgcagaccctcttttccttctctgccctcttctttttgtcttctatctcctggtgcgctttaaacaatttttttggtgaaatatatgtaacataaaatttgccatttgaactccaagtgtgcagtttggtggcattaaggacattcacaattgtgctgcagtctcctgcttccatctccagaactttttcatcttccgaaactgaaacgctgtacccgttaaacagtaagtgcctgttttttttttttgtctttttgtttttttttgttttgttttgttttgagagggagtctcactttactcactttattgcccaggctggagtgcagtggtgcgatcttggctcgctgcctccggggttcaagtgatttttgtgcctcagcctcctaagtagctgggactataggcctgcgccaccgcccctggctaatttttgtattttttagtagagacaggtttcaccatgttggccaggctggtctcgaactcctgacctcaggtgatccacctgcctcggcctcccagagtgctgggattacgggtgtgaaccactgcgcctgacaatgactgttaatgttatgaatgaaactccccattcccccatccccaacccctgatagtctctcttcggctgtctctatggatttgcatattctcagtacttcatggaagtgaaataacatgagatttgtcctttcatgactggcttgtttcacttagtgcaatgtccttaaggttcatccatgttgtagcctatgtcagaatttcatgccttttttgtttgtttgttttggagatggagtctcactctgttgcccaggctggagtgcagtagtgtgatctcagctcactgcaacctccgcctccctggttcaagcgattcttgtgcctcaacctcccgagtagctgggattacaggcacctgccaccatgcccggctaatttttgtatttttagtagagacagggtttcacattgttggccaggctggtctcgagctcccgacctcaggtgatctgcctgcctcggcctcccaaagtgctgggattacaggcgtgagccaccgcgcccggtctcattcctttttaaggtcgaatcatcctccattacctggatgcaccacattttgtttatccattcctctattgatggacatttgggctgcttccccttttgactatcctggtgccttttgacattctgtgctcaggaacagcagacagcacttccgcactatgcttgggaccacttgaggcagcaaaagcacctgcaaaagtgcagaagtcacagcactaaatagacccagaacaagacacctgcaggagagctgacccaggtagacgaagtgcggcgttgccgacctcagctgggagcgtgcgcgtcaggcagtgagaatttgtggctgctcagtgcacgcatgtgtccacaaatgactgtgaagatactgggagtagtgatttgggggttagaaattttagcaagttggcaaacttgcaagtacaaaatctgtgactattctgtgattaatgaggattgactgtacttgcatcttcatagatgactctccctccttccctcctgagatgacagcattaatccattcagcaaggcccaatcacatcttaaaggctccatctcccaacattcttgtgttggggattaagtttttaacccacgaactttgaggggcacgttcataccagagcagcgcccaatgcctgtcatatagtacatgcccagtgaacagtgagtgaatgaagggcacaaggactgaagtacctgtgctgagttgttaggcatgagaatcagcagggagagatctttctggcaggggagcctgttcctctcctccctgggaagaagccctctcctgtgctcactgagaggcatccagtgatggtcatggaggttggaattgtgtggcagaaaagtgcaggcctgagatgtagttctagtcccagttttaacaggttttgtggtctttggcaagtcagttcacctctcagggccttagtctcctcacttatacattggagggcagttttcttccccgagattctttccacacaaaccctgggaaccctgcctctctccgctgggaccttcactggaggccgtaggaacagtggggtccatgcaacgaaagagaccaagaggtcttcgtgtctgcagagatgaacttctctagctcccttagcctgccaatccaggctacccctccctccaactctgcacatctaacttgcatccctcgtgctgcagagtcagatcatcccccttcctattgtcaacagaagtgtttgcaaaataggctggatgtggtggcttacgcctgtaatcccagcactttgggaggccgagacgggcggatcacttgaggacaggagctcgagaccagtctggccaacatggtgaaaccccacctctactaaaaaaacaaaaattagctgggcatggtggtgcacgcctgtaattccagctactcaggaggctgaggcaggagaatctcttgaacctaggaggctgagattgcagtgagtccatatcgctccactgtactccagcctgggtgacagagcaagactctgtctcaattaaaaaaaaaaaaagttggcaaaataggtcaaagaagcatcatggccaggcgcagtgactcacgcctgtaatcccagcagtttgggagggcgaggcgggcagatgtctgaggtcaagagcgaaactccatctcaagaaaaaagcagcatcatgatgggcaggaggcagcttgcagtggggaagggcttcagagccgcagtctgagccttgtctcttactggctttgggctgggacacagcacttcaccttaggagcctcagcatcttcacctgccaaatggggcagtgcagctacctcaaggggatgggggcaggattggaggaagatgtagtcaagtgctttgcccagtgcctgatgcagagtgggcatttgaaactggcacctcctagtgttaaagtagtaaaacgtgtgtccctcagtgtccagggcacctctttgacactcagccctcccacaagtgctgggctgcctgtatccgtcctgcagggtcgcctgcccagtgcacaggggcttgcactgtgtgaggaggcagcacagcccacccggcactacctgcaggataggttcttctttcccgcccaggtcccctggcctcctccctttgtcttccagctcctgagtttccaagcttagttagcgtggaagacagcagacaactgactggccagagtagcacagcacattcaggcaatcagtgtagcagctcaggggcctctgggaactggggctcagggaacccttcagggtagagggggcctctcactgcacccgcttgtgccctgtacctacctccacccaagcctctgacactccatagcacttacctgtttgcatgtctgtctagtctcccatccccatctgaagtctgagccccatgaaggtctggacccttttctctagagtttagtccaagaacaggtacttcaagtaaagagttagttgatggactgttggcaggaattaaattagtactgaggcccaccctaagcagggaagcagtatgaacagacttggggctcaggagatggtgagaagcccaggggtgctggagggtagtggggatgcacctggaagaaggctggggtctgctgctcctctttcacctgtctcattttaagagatgatttctcttaaaatgaagagacttctccatttcttattttgagagatgaagcccagtgacccccaaaatcagggtgttttcttctgaattctctgtctcagctctagaggctggaggagttgtgaggggcttagggatcacagtggctgcagaaggctctgaaaggagggctctgggagcgtgagatggatcggactagggagaggacgtcaggttggcctggggtctggttctgccttttctcggggcaggtcctttgccctccctgaggcttggactctccatttggaacttagcatcctgattcccttcctgtcctgaaagtgtttttggaggagcttactgttctgagtattagggagatcttaataaaagcccatacattcctgatccttctggaaattcctgagtaattagcacctgtgggccctaggatggagcaacctgctgtcttctggggttgccctgggggctaccctgtagcttttggttggggctgaggcagagtagaggctcctgggctgggccctgagaaccaagtctgggattatttttactcttctgttcacagcgcatggcccagctccacgatgccatctgtcccccgcctccagctctcccctggcaggccctcctgggtcactgtggtgcacttggggaaggaggaggaggctggtgctggcttaccccattccatgagccgcagggcagggcggtgcgtgggaggtttgcctggtggcaggaggcagctgccagccccgggatgtgggccgcgggcagataggagaagctcgccagtgacggctgtgaacctggagcaccagggacacgtggggctgggagcaaccccatttcggtaacaaaccctgtggcccagggccttggatgacctgctgccctgcttttcctgggacagacccaatcctagggacatggagtgcaggtcctcagaaaaccccactcgtggggcagggtctggcattaggagtctttggttctccccaggtgtgtgttctgctgggctgccctaggcccaacttctgcagggactgatggtgctcacttcaccaggccagtccagctcagcttgggtgaaggaaggggaattctgaggaggagcagggcccagagaccatagaaggggtcaggtggggtaagggaggtggcggccctcctttccgtctcctgacatcctggcctccaccgcaccctccacctgactcagggcatccatctgtacttagtgtcaggtccagaagaaaatctaggctacaaccaggacttaagaggcctcaggtattaaaatgattaattaattaagtattaatattaggcattagggcttcagactttctacttggcattgtttatggcttagtaacaatgaagacaataagaaatagctcttatgagcactgactgtgtcaggccctacgctagatgacatctcactatgtcatctctcctgcgggacagccttccgggatggatcagttccccagccttctgagcagagccacacatgaaagtctgcaaggtacttctagaggccactggagacttctgggatctggggagggagtgtgaaccacagatactgctagcacagaaaggaccctggatcccaaggagggcatccttcttgttttacagataagcaaaatgaggcccagaaaaatgagaggtggtttgtctgtggttgtgtagttggtggtagaactggaaccaaagccaggctcttgcttcccatacatcacacttccattctacaagcctccaaaataagccccaaagggatttatgcacaattcaagctctttttctggtatgccaaaatccagacatttcctgaggtttcttttgtttcccaaaactaagcacagagcaatctgttctccccacagagaaatcattattccacaataacacttaacaaatatcccttcgtttgttcattctgtgttcatcagctctgtgcagcgtgctgaggacttacagaggaagacagctgtccctgtccccatggtgtctaaagtgtggtggagaccagtccttactgggagatgggggctggatatggaaatgcaggaatctgctaaggttggagtcatcttcccagagggagtgacatatggctggaccttaaggctgagcaagagttggtccggtgaacaaggaatggaagggaagtttcaggtagcagcacctccaccaggagtggagaaagagcctagcatgttggggggtgatttggatggctgagtttggggcttggaggtgggttcaaagaaggaagtacagagggtggtgcctgtgtgcggaaggtatggccggagagcagggatcagcagatggaagcgctagaaaatcccatcatggagtgtgtagtgttatcttaagaacaaagaaaaggcattgaaaatttttaggtagcagaatcatgtgatcaggtttgcattttagaaaaatcactggctggggtgaagagattatggagcctgaatggggttgcaccaggtcatccagatgtgcatcgctggaagcttggattagggctgtgagatagagtagattcaggagacatgtaggcgacagaaagacaggatgtggtcattagttagatgtgggagatattaataagagggaaaagtcaaaacagtcatgtgctgcttcacgaaggggatgcctcctgagaaatgtgtctcttggcgatttcatccttgtgcaaccataatagagggtccttacacaaacctagatggtatagcctacgacacacccaggctgtgtggtacaacctattgcttctgggctataaatctgtacagcatgtgactatactcagttctataggcaactataacacagtggtaactctaagtgttagtatttgtatatctcaacattcctaaacatagaaaaggtacagtgaaaataaaatataaaagataacaaatggcacacctgtatggggtacaccatgaatggagcttgcaggactggaagctgctctgggtgagtcagtgagtgaatggtgagtgaatgtatgctactgtaggcttgactgtacactactctacactaggacattactgatactactgtagactttataaaaacagatacttaggctacgctaaatgtatttaaaatgatttttcttcaagaatatattaacttggctttctgtaacttttttactttataaacttcttaattttttgattcttttataataacactttaaaacgcaaacacctcacgcctgtaatcccagcactttgggaggccgaggcgggtggatcacgaggtcaggaggtcgagaccatcctggctaacatggtgaaaccctgtctctactaaaaatacaaaaaaactagccagtcgtggtggcaggcacctgtagtcccagctgctcaggaggctgaggcaggagaatggcatgagcctgggaggtggagcttgcagtgagccgagattgcgccactgtactccagcctgggtgacagagcaagactctgtctcaaaaaaaacaaaaaacaaaaaacaaaacccaaaaacgcaaacacatcgtacagctgtacaaaaatattttcttaatttatatctttattctataagccttcttctgtttacaaaatcttttttttttttttttttttttgagacggagtctcattctgtcccccaggctggagtgtagtggcacgatctcggctcactgcaacctccgcctcccgggtttaagcggttctcctgcctcagcctccctagtagctgggattataggtgcgcaccatcatgcctggctaatttttgtatttttagtagagacggggtttcagcatattggccagggtggcctcgagctcctgacctcgtgatccacctacctcacctgtttttttactttttaactttgtcgttaaaaacagagacataccagccgggcgtggtggctcacgcctgtaatcccagcactttgggaggccgaggcgggtggatcactacgtcaggagttcaagaccagcctggccaacagggcgaaaccctgtctctactaaaaaaatacaaaaaattagccaggcatggcggcggttgcctgtaatcccagctactggggaggctgaggcggagaattgcttgaacccgggaggcagaggttgcagtgagctgagatcgcgtcactgcattccagcctggggaacaagagcaatactccatctcaaaaaaataaaaactaaaaaaaaataataaaaacagagacaaacgcacacattaggcctgcacagcgtcagggtcgtcagtatcactgtcttccacctgcatgtcctgccccactggaaagcgtttggggcagtaactcgcatggagatatcatctcccagggtaacagtgtctttttctggaatgcctcccgaagggcctgcctgaggctgttttacagtaattttttttttacaagtagaaggagtacactctaaaatgatgataaaggctgggtgcggtggctcacgcctgcaatcccagtcctttgggaggttgagacgggccaatcaccagaggtcaggagttcgagaccagcctggccaacatggtgaaactccgtctccactaaaaatacaaaaaaattagccgggcgtggtggtacgtgcctgtaatcccagctactcgggaggctgagtcacgagaatcgcttgacctcaggaagcagaaggtgcagtgagctgatactgcaccactgcactccagcctgggtgacagagtgagactctgtctcaaaaaataaaaaaaaataaataaataaaatagatataataaaaagagacgacaaaaagtatagtatagtaaatagttaaccagtaacacagttgtttattgtcaaggattgtgtactgtacataattgtgtgtgctagacttttacacaacagacagcacaagtaggtttgttttacaccagtgccaccagacacgtgaggaatgtgtggcactgccatggtaggatggctctgacatcactaggcaataggaagttttcagctccattatcatcttatgggaccccctttgaatgaacgtttggggctgactgaaattttgttatgcagtgcatgactgcgttcctagctttctggtctctgtgtggatagtgagtggttcatttcctgagagagagccgaggaggtggaacaggatatggggacaagctgaacacttggttttgggcatgttgagtttgaggagctctggagattgattagagatgcctggtaggcagtttctgtgaggaccttcacctcaggaaagatacacagatttggggattaaaccaatagagtgggaatgcaagccttgggtggggatcccccaaggagtctgtttagggtttaaaaagaagaggtcaggtcagaacccagggacacatctttatagaatgagtctggtgaaatatggagcccagggaatatggagaaaggaagcctggagctgacttggaagactacagactcctcctgcttcttccatgtgttttcagaatcagcttgttttttttgtttgttttgttttgttttgttttgttttgtttttttgagacggagtctcactctttcacccaggtgggactgcaggggcgcgatctcagctcactgcaagctccgcctcccgggttcacgccattctcctgcctcagcctcccgagtagctgggactacaggtgcccgccactgcacccagctaatgttttgtatttttagtagagacggggtttcaccgtggtctcgatctcctgacctcgtgatccgcccgcctcggcctcccaaagtgctgggattacaggcctgagccaccgtgcccagcctggaatcagcttgttaagctttgtggaaaactgtgtggaattttttaaaatcacaatttcagggccgggcacggtggctcacacctgtaatcccagcactttgggaggctgaggaggaggatcacttgaggtcaggagttcaagaccagcctggccaacatggtgaaaccctgtctctactaaaaatataaaaattagccaggcgtgatggtggcacatgcctgtaatcccagctacttgggaggctgaggcaggagaatcacttgagcctgggaggtggaggttgcagtgagctgagatcacgccactgcactccagcctgggtgacagaacaagactccatctcaaaaaaacaaaaacaaaataaaataaaataaaaaatcacaatttcattgaatttatgatttatttggacagattcaacatcttcataatattgttttcccattcatgaacacagtttctctccatttatttaggtattatgacactgtgaaatacatactaggggtctggcgcggtggttcaggtctgtaatcccagcactttgggaggctgaggcgggtggatcacctgaggtcaggagttccagaccagcctggccaacatggcgaaaccccgtccctactaaaaatacaaatgcaaaaattagccgggtgaggtggcgggtgcctataatcccagctacttgggaggctgaggcaggagaatcgcttgaacctgggaggcagaggttgcagtgagccgagattgcgccactgcactccagcctgggcaaaaaaagctcaaaaaaaaaaaaaaaaaagatatattgggacttcattcagtgtcctgccatacaactcctaaaatccttgcaatcttcaaaacgatgtgtctttttgtatgctaatgagtcgatttagggcttgcagtccctaggtagcttcaggatgggaccagactccagaaagacaaagggcaggattagaggggtggaacttgcagccacaccctccaacctcagggaggcaagaggggctgaaggtcaagttgatcaccagtggccaatggtttaatcagtcatgcctatgtaatgaagccaccatagacacctagaaggactgtgttcgaggagcttccagaaagctgaacgggtggagggacctgaagggtggcgtacccaggagagaacatggaagcttctcgaaccgtcccacgtgccttgccctatgcgtctctatcctttgtgagatcctttagaataagctggtaaaggtagatagtgtttctctgagttctgtgagctactatggcaggttaattgatcctaaggagagggttctaggaaccccacctatagctggtgggtcagaagcacaggtaaaacaacccagggcatgggattggcatgggaagtcgggaggcagtcctgtggaaccgagcccccaccctgtgggatctcctggcttcaagcaaccctcctgcctctcggcctcccaaagtgctgagattataggtatgagccaccatgcccagccctgattttctcaatgaggctctttgattggtaaattctctattatttttgtctaaaaatgcctctatttaatcttcactcttgaatgattttttgtttgggttttaaattcaagattaacagatagtttcttttaacaatttggtgatgttatattgagtcttctagtgttactgttacgaagtttgctatcagtttgttgttattattgtttttgagacagaatctccttctgtcgcccaggctggagtgcaatggtgcaatatgggctcaccgcaacctctacctcctgggttcaagtgattctcatgcctcagcctcccaagtagctgggatgacaggcgcccaccaccacgcccagctaatttttgtatttttagtagagacaggggtctcactatgttgcccaggctggtctcaaactcctggcctcaagccatccacctgccttggcctcccaaagtgctgggattacaggcatgacccaccacaccagaaagaagttcaatatcagtttaatagtccttcctttctagataatctgccctttttcactcttcatgcttttaagatctctgttttgggtattctgcagtgtccctacgttatgtgttccttttatttgaatttatcctggttaggattcagcatggttcctgaattattggagtcatgtcttctattaatctggaaaattgcctgctgttttctcttcaaatgttgctctactgtatttattttctatgttctctttttctggaattctgatgttgaattgccttattctgttctccttgctctttactgtcatttaaaaaatacatctgggtaatttcctcagctctgtcttccagattgttacttctttatctagctgtatctaagttgttaatcccaaccattgggtttttaatttcagtgactaaaatgtttatttttaaatgtttgatgtagttctttttccagcctactttgtagttttgataatatcttattctttcccatatttacaattccttatttaggtcaataatcatttaaacataatctcttcagagattttcagcctgggaccactgtttatttttaagaattggctagaggttactaagcgatataaaattcaaatttcaaatccattaaagggtaggcccttggttacaaattcttttttttaagaattattttttatatctagaatttaggctaagacagataatctttttttttttttttttttttttttttgagatggagtctctgttgcctaggctggagtgcagtggcgtgatctcagctcactgcaactctgcctcccaggtacaagtcattctcttgcttcagcctcccgagtggctgggattacaggcgtgtgccaccatgccaagctaatttgtgtatttttagtagagaagaggttttgccatgttggccagactggtcttgaacagctgacctcaagtgatccgtctgtctcggcctcccaaagtactgggattacaggcatgagccacttcgcctggcccagagaacgcctggcccagagaatcttcgctgtcatattttgtcagtgttctactggttctctgaggatttaggtatagttcccagtttcagcttctctgcatctcttaggtctaaggtctcatctctgagcaaccattaaaacccagttgtgaccaggcatggtggctcactccatgggaggccaaggagggagaattgcttgaggctggaagttcaagaccagcctaggcaacctagtgagacctctgcagtaaatacataatctctacagtaaataaataattagccgggcatggtggtgcgtgactagagtcccagctactcaggaggttgaggcaggaggatctcttgaacccatgagttcagtgctgtactaagctatgatcttgccagtgcacttcagcctgggcaacagagcaagacactgtctctaaaaaataaaaaataataaaaatttaaagtgatgaaaaataaaaaaccagcttcctcattactaagggagctttgctcagtcgtttctaaatttatttatagagtgagagttttaaaatcatcttatctactatattgccagaaattaaagttggcaactcttttaagtagtttgtttcaggctgggcatgatggctcacgcctgtgatttcagcactttgggaggccgaggtggatggatcacctgaggtcaggaatttgagaccagcctggccaacgtggcgaaaccccgtctctactaaaaatacaaaaatcagctgggtgtggtgatgtgtgcctgtaatcccagctactcagtaggctgaggtgggagaattgcttgaacttgggaggcggaggttacagtgagccgagattgtaccattgcccaccagcctgagtgaaagagcaagactccgtccccccacaaaaaaaaagaagtttgttttggaagtatggaaaaatgttttcatgttcaggatagaatcaagaccagaatttctgatgagaataagctagtttattcccgaaaaagcgactctgcccccaaactctcatgaaaacttactttaacagccacagagacaacaggcaacacttgttacactaaaaaggccagtgactctgaagggctgagaacaagaccttgacctgcaccttggcctcactgcgcgaccttgggcgtgtccttaggcctctgggcctcagtgcccttttcagcaagctgaaggagctgcttaggtttcctgtggtgggggttggggggggcggttcctgcttttttttttttttttttttgaggcggagtctcgctctgtcgcccaggctggaatgtagtggcaccatcttggcccactgcaacctctgcctcccgggttcaagtgattctctggcctcagcctcctgagtagctgggattacaggcacccgccaccatgcccggctaatttttttatttttagtagaggcggggtttcgccatgttggccagggtggtctcgaactcctgacctcaggggatccacccgcctcggcctcccaaagtgctgggattacaggtgtgagccactgcgcccggctggttcctgctttacgtgtcagtggctctaacctctttcccactgcatgtctgtgccagctgctttgccaagctccttttgacctctcctcctgggatgtgcctcccacacttagcccctccctcccctcgatcctcaccccctccctcacagtgcctctctgtgaaggaaattgtccttctcacaggccatgggtgggagatgaggggtttgagggtatggagggcaatgataagcgaggaatgctctgggaggtcccacttcagaggatccgaggtggaagtggtcgaactcaggggtttagacccccagcctgggtttgggctgctggactgcattgctcctcaaggctagtgggggagaagggacgggcaatgtgtgtgacgcggtgaggtcctcctttacaagtggactcggtggctgggatggggagaagttgggggctctgcgagggctgtgggaggtacgtggttcccagctggtactcataacccaaaaactgccttaagattactggtatgtcctgctccttcacaaacccctgagaactatgtttggaagcttacagcttggatggttggagccaagaggtcactggatttgtctcatgttaggggaaggtggggttgtgaccatgagcctccagaggcaccagaaagtcaatcctgccgttgctccagtgtgtgaggagctgccaagactgtttctttcagaaagagcctgagttgggaagggaacaggagaatagtgacctacattatattgtatatgcgtttttaaaaatttttcattgtggtaaaaaagaccacaaaatgtaccatcctaaccctcttgaagtatccaggttggtagtgttacgtatattcacaatgctgcgcagcaggtctccagaacttcttcatcgtgcaaaaccgaaactctgtacctgtcaagtcacaactctgtgtctttctcccacgagctcctggtaaccaccattctactctgtttctatttgtttgaccacttaagaacattttgtaaaaaaaatttttagtagagatgaagtcttgctaactcctggactcaaatgatcctcctgcctcagcctccctaagtgctgggattacaggtgtgagcctctgcaccctgccgactactttatttttattttattgtattcatttattttgagacagagccttgctctgtcacccaggctggagtgcagtggcgcaatcatggctaactgcagccttgacttcccaggctcaagtgattctctgccctcaccctccagagtagctgggactataggtgcgagccagcacacctggctaattttttttaaattaattttttgtagagatggggtctcccgatattgcctagactggtctgaaactcctgggctcaagggatcctcctgcctcagcctcccaaagtgctgggagtataggcatgagccactgtgcctggcctaatgtgactgcttagatacctcgtcagcggaatcatgcagtgtttgggttgttttgtaactggcgtgtttcactcagcataatgtcctaaaggtccgtctgtgctgcagcacgtgtcccggttgccttcctttttaaagctcctatttcgctgtaggtatacaccacattttgttcatgcattcatccattgatggacacttggtttgcttctaccttttgactcttgtgaataatgctgccgcgagcatgagtgtacatatatatctttgagaccctgctttcagtttgtttgggtatatacccaggtattgggtcatatggtcttgctctgtcacccaggctggagtgtagtggcgggatctcggctcactgcaacctctgcttctcggattcaagcgattctccttgtctgagcctcccgagtagctgtgattacaggtgcccgccaccacacctggctaatttttgtatttttagtagaaacggggtttcaccatgttggccaggctggtctcgagttcctgacctcaagtgatctgcctgcctcagcctcccagagtgctgggattacaggcgtgagccacagcgcccggcctgtaccattttgcattcccaccaacagtacccaggattttgcatgctttttgcccagggtcgatttaatgtcagtgcatccccggcactgcatccttgtctcctacttttcagcccttgtctgggttccttgataccagggagtgcctaggtcattgtgctcattcgacagatgggaagatgagctctccagaggggatgggacctgttcaagaccccaggcctgattctcacagatctttcacttcacgctttgcttcctgagcaactgattcgggctctggcactccccggagtgccttcatcccgtggcccacgcagttcttccactgctcaccggggctgtggttcctgtccccacaggtccaacgagcgctcctccaagcggagccttggagggcacggccggcaccattacctccaacgagtggagctctcccacctcccctgaggggagcaccgcctctgggggcagtcaggcactggacaagcccatcgacaatgacgcagagggcgtgtggagcccggatattgagcagagtttccaggaggccctcgccatctacccgccctgtggcaggcgcaaaatcatcctgtcggacgagggcaagatgtatggtaaggagcccgtcgggttcagccctgtacctgaggctgaggcaaggggccgacaccagaaccttggggttcctgccgggccacagaaggggatgaccacttggggctttgtcgggtggacactgctttcttccctcctgggctcccaagggatgggggcatctgaggagaagcctgtgagggggtgtggagggtggggcccctggcggtgagcagagatgggagtgggaatcttggaaaaggcgaatctgggtggggtagaacatccccccagagcaggtggggagcaccccacaagctgtaccccagcaggtgcctgaccagcaggctgcccaccttggctgtgaaggatgctcactcatcccctctttccctcactcattcatgcaacaaacagatgccgagccttctgtgtgcctggtgtgggttagacgggtctagtcccagcctgtcatctggggtgagggtaatgtgagctcacagatacctgctctgcaaggcagcctggagagttcctaggagaggcagagtgctggagaccactcccctaggaaaggccccccccaacccagcagagggtcaccagaaacggcttgatctttgtgagtggctggggttgcagaacacagctgaaactgttcagcgatgcatgggaaggaccaagcagttggcatggggccacgatgacttttggatggaagagggggcatctggaaaaatgaagcaggggctgggcatggtggctcactcaagcctgtgattccagcactttgggaggccaaggtgggaggatcacttgaggccagcagtttgaaaccagcctgggcaacaaagcgagacaccatctggagtaaaaataaaaaaaattacccaggtttggtggtgccagcctgcagtcccagctactggggaggctgaggcagaaagatctcttgaggccaagaggtcaaggctgcattgagccatgagtgcactgttgcactcctgcctgggtgccagagtgaggccctgtttcaaaaaaaaaaaaaaaatgaagcaagaataaaaactgaatggctgttggaaggcccagataaggcttctgttcctgttggaaagtcctctaggaatcctagctcaaaacagtggtcttggggcaggagtgagagccctgagtgggtctctaaatggctgaagtcagtgacaacggggcccctgcctggcttccaacaggatggccccagaccagctgcccacccccacgggtttccattcatttctcccccacacccaacgctggtgccacccccaccattgttgcttggctcggcttccccagggtcgcccttacttctgggtcggccctctagactctccctgctttgaccacttcttgctctgatggttgcttattttttcctttttcttttctctctctctctttttttttttttgagatggagtttcactcttgttgcccaggctagagtgcaatgggcgcaatctcagctcaacgctacctctgcctcccgggttcaagcgattctcccacctcagcctgccgagtaagcttggattacaggcacgtgccaccactcctggctaattttgtatttttagtagagacagggtttttccatgttggtcaggctggtcttgaactccagacctcaggtgatccgcccaccttggcctcccaaagtgatgggattacaggtgtgagccaccgcacccagcttttcttttcttttcttttgtttttgagacagagtcttgctctgtcgcccaggctggagtgcagtggagcaatctcggctcactgcagcctccgccccgtgggttaaagtgattcttctgcttcaccctcccgagtagttgggtctacaggcgtgcgccaccacgctcggctgattttacaggtgtgagccaccatgcccggccttgcatctgtatttctaaataaaatacttgaatgtgtttgtggcagttaagataaaatttgtctttaacagatcccaaataacagtggcttacataagggaaatttccttctctctcctataaatgtctggagggtaggtagtccagggaaggtgtggcagctctgctccatgaagctctcagggacccaggatgcttccgtcttgtggctcatgagcatgccttccattgtgaatgttcccttaaggcccaagcagctgcttcagctccaggagttacattgcagctagcagacaggagaatgggatgaagaagagtgacctggatacatttaaggaagacactgggaaactaacccctgaaatatttactggccagaactcctgtgaagtcccttccacctctacttgtgaagttctgcttcttacttttagcgcctggggaagcgtcatgggggagacagctgtgtgtggagcacctgggggtgcctggtgtggtgttcggtgctttgcagaggttgttgccatttagccaggagggacgcagcctctgggaccccccgggctctgctttggtggaggaggggatgggtatagattgtagcttaggtgtgaaatgagaaagggcagggggagtgtagggaagggcaggtggcttggctggggagctgtggtgtatgtcctggacccttcacagggcaggtctgtgtgctttagagacagaggtgggccggaaaacgaaagtgtgcatgaggcatccagcaaggggcaagggcggagggcgctgtgggtgtctgggagggccccgtggagatgctagaatgcactaaatcaacagacatttgtggagttgagcacccctggggaccaagggctttgaggacttgctttttcggggggggggtgtgtgtgtgttaaaaaatacgtaacattttccattttaatcattatagtttttcagtttataatttgatggcattaaatatattcacattgatgtacagccattactaccacccatcgccagaaatatttcatttcaaagtgaaattctttaccttttaaacaataattccccattctcgccatcctccccgccctccagccctggcaactgccattctgctttctgtctttatgggtctgactcctttagttacctcatgtaagtggaatcatacaacatttgcccttttgtgactggctaatttcacttaacacaaggtcctcaacgtttatctgtattataacctaggtcagagtttccttcctttttaaggctgagtaatattccattgtatagaccacattctgtttatctgttcatctgccgacagacatttgggtggatgcttagttttatttagttgttataggtagatatttctgtccctgcttcacatataaagatactggggttaagagaccgtgaccaaccctggggaagcgccgggctgtggatctctggcaggacttgggttggaattctctttggcaggagggaagccactgactcagggaagcagactgaaaatggtttggcaaactgtcctggccgtgttggcatctcggatgctgctcctcccctgtgctgagacccagggaggggcatgggatggggacgctcgggagggcctggaggaagagtgaggagaggcagaggtgctgcttcactgtgcttcataacacgtcagcgctcccagcatcctgggcatctgtgatctttcggtcctttcaacggtcccttcaaggagggaggaatggcacctctgcttgcagatgcagaaatggaaattcagggaagccaagagtttctcccagtctctcaagttggaagtggagagtggggctttaacccagttctcctgcctccgagcttggcgttcctctgtcagctgaatggccttgctcctccactgcctggccctggctccaggtgggtcaggccctgggcagggccctggaggctgtactgcaggctctgacaaccgcccagcccccacagcacctgtcctgcatgagaataggttctgctgggatccagacacccgctcaccccgtctcttcttaccagtcccgggggccgagccaaggcaggactgcgtggggactgatggagggctctcagcaggcagtgctgaccagcccggctgggagctatagatagctctgagctcacccccagtgtgtgggatgggccctctgggaggcggaatgggaggccgagctgagagctgactcagacctcagctcaccgtggctgctcccctcctgtcttctcatcttcccttggggcatctgcgcttcccatcctctgtgtaccccagccccattctgagcccccagctgcttctagcatccccagagctctggtcttttctcccccctcacttccctgcatccaaaggccaccagcccctttccaagtgggccggcccggtggggtatggggtggggctaagaggatgattcccgacctggggacccggccttagctgtttgaggacaggggttaggcctgctccgagctccgcccacggaacatccagcataggacacgctgaccaaggccaggcagacatgcagatgacatgcaaagcagcacggcagattaacacctgctatttctgagctgagtctcccacgcttgttggctccagccctccccttgagcacctcttaccctcctgggccggctcccgagcccggggtgcttgccttctcctgctcacggccgctttcatttctgccctgtcactgtgtgaccctccccctggcacagccaacgctggccaccctgacctcctttggccaggctcacagtcggcctagcctagcgtgcaggtggtgggattcgaacaacttctcgcccccttctgcctgctccccgccttccccgctcctcacactcagtgctggccgggtgggctcgtgtcccgcctcctgctctctggagggctgtggctggctctggggttccctctgcattcatccctttctgcctcctgtgcttctcaccttcctgaggttgctcttgactttcccgagtcttcctgcctcttttccctgcctctctctctgcttctcccctcctgtgtcccaggtgggccatcctattagcagcccgtcagttctcattaagtgaccaccccacactgggcaggccgggctgaggccgtgtggtctctgctctccacaacttcatggtctaatgagaggggcaggaaaaacttctctggacagttagccacccaagcagacactggggttgtccacagccgatattaaccagatttatcttgggagttttcctgaaggaagcagagctgagggtgagtgcttgtcttggtctgttttctgttgttgataacagaatacctgaaactgggtaatttataaagaaggagtttattccttacagttacagaggctgggaagtccaaggttgaggggctgcatctgtgagggccttcgtgctggagggaactctgcagagtcccgaggtggtgcaggcatcccgtggcgaaggggccgagtgtgcttgttcaggccttttcttcctcggagacagcccccagtcccactcctgcgctctgttagctcattaatccctgcgtggattaatccatcgtgaaggcagtgccttcagggccgtatcactccttaaaggcccacctgtccatactgccacatgggggattacatttcaacatgaattttggaggggactaatattcaaaccatagcagtgctccaggcaagggggtggagagattgtgagcatcagtctagaggcgagacttcacatggtgggtttgggggaccctggtggaggatctgggcaaagcactgttggttcgtcagactgtcagaggtgaagggattccctcgttttctggatgagtcacacagctaataagaggcagaaccgggaccagactcagcctgagtttgggactagatagagcacgtcgagggtcttttcacaaaggtgatgggacagaggtcacggagtttcacctgggctcctgccccccgcttcttcaccatggcctcatttgcaggattctctgctcctctttgctttgttgccctgtgggtttccagctgctcctatgctcctccctgcggcctacaaccctgacttcaggtgcctggagacttgatgacgggagtgttcaaatctactctgtccctgagagctggcgtgaccttgggcaagttatttaacctccttgggcttcattttccttttgtaaagtggaggtcataatactactacctttgtgggaggtgatttggtttatttattttattgtgagaaaaatatacattacgtaaaattaaccatttaagccatttttatgtgtacaggtcagtggcattaagtacattcacctttttgtgcaaccatcatcaccatccatttccagaacttttccatcatctcaaatagaaattctgtacccattaaacaataattccccattcccctctgcccctatagccgctggtagcctgttctattttctgtctctatgatttgcctattctaggcatttcataaaggtggaatcaagccagccgcggtggctcacgcctgtaatcccagcactttgggaggccgaggcgggtgaatcaagaggtcaggagtttgagaccagcctggccaacatggtgaaaccctgtcactactaaaaatacaaaattacaaaattagccgggtgtggtggtgtgcatctgtagtcccagctacttcaggggctgaggcaggagaattgcttgaacccgggaggcggaggtttcagtgagccgagatcatgccactgcactccagcctgggcaacaaagcgagactctgtctcaaaaaaaaaaaaaagtggaatcaggccaggcgtgatggctcatgtggcttatgcctgtaatcctagcactttgggaggccaaggcgggcagatcactcgaggtcaggagttcgagaccagcctgaccaacacagtgaaacccgtctctactaaaaatacaaaattacaaaattagctgggtgtggtgtgcacctgtaattagctactcgggaggctgagccacgagaattgcttgaacctgagaggtggaggttgcagtgagctgagatcatgccactgcactccatcctggatgacagagtgagactccatctcaaaaagaaaaaaatgtaatcatacatatttccccttttatgtctggcttatttcagttggcataatgtccttaaggttcatccatgttgtagcgtgtttcagaatttccctcttttttaaggctgggtaatattccattgtatggagagactgcatcttgcttatctgttcacctgtggatagacatttgtattgcttctactttttgactactatgactaatactgcagtgaacattggtgtacaggtatcttgagtccctggtttcagttcttgtgggattggaattgctagctcatgtggtaattttatgtttgagtttttgaggaaccaccaaactgttttccacagcagctgtatcagtttacattcccgccagcaatgaacaaaggttctgatttcgcatatcctcatcagcgcttgttattttccattttttggatcatagccatcctagtgggtgtgaagcgctatctcgtggtttttgatttgcatttccctgatgattagtgttgtggagcatctttccatgaggttattggaataagacattgccttctagtgttgtcgtagggatgagagcacacagtaggtgccaaatgcacagcacggggtgaggggaacacgtacctgccctcaaggaactcacagtgtggcgggggagcatgactaggacagacaccgaggcaggaatgggcatgccctcttgggtggggagcagtgcaagcttcttggggcttcctggagctgtggccttgaagcctggctgatttcaccagaagcctcagagccctccagggacaatggtaggaacagctcaaatgtcaggcccaattgctgccttctcaggcttcagtcagaagttccttctccacaaatagcctccttctccagccccaggtgtttatggcttcagttgatccctggatagctgcacccccaacacacacaccctggcccccgcttccaggccattggggattagggtggggcagcaaggatgtgcccagcctcctctccctgagccccaacctacaggggtgcagtgtggcacttgctcactccaccagaggcctacagtgaaccaaagatgtccacgcacacttccacccactcttgggtggggaggcttgtgctctcagctcctcagtccttttcaagtttgaaagctaatagcattcgttataatagggcttcgttaacaatattaacagtaatcgctgaccttgctggccctctgctgagtggtgcgtgctttacttactccatgccatttaacagtttatggtctagggggtgggctgccatggagagaggggactcagcacagaggaaatgagatacagaaatgacctagcccaggcaggattttgcagctggggtaacgttttcagtggtgctatgtggcggaggtggccggcagggtgtgtgtgaggctgagtgtggggctaggagaaagcggagattcctcctggatgctgcatcaggaatgctccaccctcagcctttaggccaaggctcctgtttctccacgggcagccttcgcccccggtggggtggggccgtgggtgtgagctgggggctgtcggacacatgtgctctgacagatggacagatgggcccacagtctggcaggggtgtccttcccatccccacccaggccggccctggggttggccgaggccacctgccacgttgcaatgcgcagctgcctgactggcctcctccttccccagcctgtgttctcagccaccagagggagaagcctgtggttatgcagctaggggcagagctgggacaaggacaaggacaagcccctcccaccgccaccacctcagctgggtgctttacaagtttctcactgccatggcccttctttgccggccttcactgtggttcccacactctacctgtaggcccacgctccctactcccttcccctcttgcccctgactctgggggccttctggtgtctacatgatccaggatacgctggctcccaccagctgtgggtaccactgtccatgagtggtgggcaggacctcaggtccaagtagttggatctccctccgggaccttacctcatgcagagacttaggaatcggggggattgatccaaagggaaggagcagcatcgtcccttgcggaggaagctcagccctgtcgggggagcatatcctggggggaaatagccagcatgtaatactctcgaagcactggggcagccttggaaaacataccttctcgtggtgcctgggacactagcaagccatgagactgtgaataagtcatttcccctctctgggcttccatttcatcttcatcaggctaaacaggacctctagagtcacgtggtccagccctgcttctgagagaagtgacctccaattccctgttcattcggagtggtaccatgcagtagccacagatgggcactggcaccagactacatggacccgaatctcagccacatgcttgcctacgaccctgagaagatttctcaaccttgctgtttccctgtctgtagcgtggatgacagtaccaccctcatttagctgttgtgaggatcgaaagggtgaatgcagataaagctgtcacaggatacatatctgtatccgcacagatacttgtactgatgaggtatgcagcaagtgttcattgtcatcaagattttcacaggagtgacaggccacggcagctccctctgtgtgtaaagcctggattagatgccagctggcctggaggcagggagatggctgcgttgacctctagagcacccctggtggcaggaaggaagctgcttgggtccccttggctcacacacccacagacaccccacacttcactccctcacggggggttctcaactgccggcatcacccctgaccagcacaacgaggctggagggtctgagatgagccagcaagggagaggaggaggaagctccacagacagccagggaaaagcacaactttaacaaatacaaacctggaggacagtatgccaagtgaaatataccagacgcagaaggacaaatgccgagagggctcacttagaggtggaatctaaaacagtggtgctcacagcagcagagagtagaatggtggttactggaggctggggcgggcatgacggggagatgttggtcaaagaatatagtttcagttagatggggaaatgtttttggtttctagtttttgtttttccgttttgtttgttttagacaaggtcttactctccctccctggcagaagtgcagtggtgtgatcacagctcactgcagcctcaatctcctggactcaagtgaccctcctgcctcagcttcctgagtagttgggactacaggcatgtgctaccacgcctggctaattttttatttttatttttattatttttatttattttgtttgtttatttttttttgagacagagtctcgctctatcgcccaggctggagtgcaatggtgcaatctcggctcactgcaagctctgcctcctgggttcaagccattctcctgcctcagcctcccgagtagctgggactacaggcgcccgccaccatgcccggctatattttttttgtatttttagtagagacggggtttcattgtgttagccaagatggtctcaatctcctgacctcgtgatccgcctgccttgcccacccaaagtgctggaattataggcgtgagccaccgcacccagacttatttttatttttttgtagagatggagtgggtttcactatgttgcccaggctgatcttgaattcctgggcttgggcgatcttcctgcctcaggctcccaaagtgctggggttataggtgtgagtcatgacgcccagtcaaggaggaatgtttttggagacctattgcccagcatggtgactgtagcgaataataacgtattgcatttttcataagttgctaagaaagtaaatttcatgttctcatcatgaaaaatgataagtatttgaaatgatgggtatgttaattatttgattcaatcattgcagattatatacgtatatcataacatcactttgtaccccataaatacaggttgagcatcccaaatctgaaaattcaaaatctgaaatactccaaagttcgaaactttttgagatgtgtgcctcgaaggagatgctcgttggaccgttttggatttcggattttaggattagggatgctcagctggcaagtatatagtgcagatagcccccaaatttgaaaaaaaccccaaatctggaacacttctggttccaagcattttagataagggctagtcaaccagtatgtacagtttaaaaaaagaaagaaaagccaggcgtggtggttcacacctgtaatcccagcactttgggaggttgaggtgggcagatcacctgaggttgggagttcgagaccagcctgaccaacatggagaaaccttatctctactaaaactacaaaattagctgggcgttgcctgtaatcccaactacttgggaggctgaggcaggagaatcacttgaacctgggaggcggaggttgtggtgagccaagatcgcgccatttcactccagcctaggcaacagagcgaaactccgtctcaaaaaagtgaaaaataaaaataatcaaaaataaagaagaaagaaaaaaaatacaaagatgggccgggtgtggtggctgatgcctgtaatcccagcacttttggaggctgagatgggcagattacttgaggtcaggagttcgagaccagcctggccaacatggtaaaacctgtctctactaaaaataacaaaaattagccaggtgtggtggtgtgcgcctgtaatcccagctacttgggaggctgaggtgggagaatcactggaacccaggaggtggaggttgcggtaagccgagatcacaccagctgcacttcagcctgggcgacagcgagactccctctcaaaacaaaacaaaaaagaagacggctgagcttgccttagaccccttggtgtggctcctgtcccgccccattactagcctctcgccgggggctgagacggcctttctagcagcagagccctggaaccttgtggcagagggtgagggtagttgtggggtggtgggcaggggctccttgcagaggctgagtcctctgtgatgtttggggttagggtctcagctgatgggggccaaggcctccctactgcttctcaccacaggctgcagaggaagcagcactgttacggggcagtcctgcctgatgagaggaggttccattaactaagcatcctcgcttggccaggcctcgggccatattcaagcacctgagccaagagtcacacctgggcagttagtcctaggtctgctgtgggtgatctggtgcagttctctggcaaataggtataattacctgcccactgcagggaggaggtggatttactgtgaagttaatgaggtttacgcgttaggacccagcacttacatgggccccttccaagtccctaaacttaatttttgcttcattgaagtataactgacattacaacaaactgtacatgcttaaagtggccaagttgatacattttgacagatgtatgcacctgtgaagccatcaccaccatcaagataatgaatgtgtccattgcccccaagtttttaacctaattttgtatttttaaaattctttttcccaaagggagcctcccaattgctaaatgtcttaggcctcacaaaagtctgggtttgctcatgtacagaaaagttcaatgagaccaggataggacagcgccttaagagttacgtcggactaatcagaagtaaaaggttatttgcatgtatttaacttactcctttgtcttagaaggctaaaacagttacgggacatctgaccagcatcttagcattcattccctcatcattcaggcagcaagtatttattgagcgcctacaatgtgcaggcagttttctaggtggtgggtataaataagtgaataaatagaccaaaaatccctattcgcatggactgtggttctgacgggggtgagggcacagacagtactgaaataagttagattatgtattatgctagaaggtgctgtggaggaaagtaaaggcagtgggtgccagggtgggcgggtaggagtatgatttcagccctcagtggggtggtcagggaagagacagtggcacccaaggggtgcaggtggtgtgggactctggggcagagtgttccctggaggagaaacaggaagcacaaggaccatagtggggcaggtgtgggcctggtgtgtttcaggacagcaagaagtttaggatggatcgggtagactagatcagagaggtgactgaactggggtggccagatcctgcaggggtttccaggccgttgtaaggacttggacactgttaatctggggcagatggaagccattggagggcttttgaatttcgatagggtcgctgcagctgctgtgttgagcatagacttggagcagggaatacaggtggaaggtgatgatcctaatccaagtcagagatggcgggagcttggaccctggagggtgcggtggtgcacagtggctgtatgaattctggatatgttttggaggtagagccacaccagactcattcattcattcagtgagtaggtgccaggtactggagatgcagacttgaatggaggcatagtctcttcctctgagctgttgagagtctaacaaggaaagacagacatggataactgatgagcacacgatatcctgtgtgcaagggacgggccagaggagcaaccaagaaccgtatcccagatggtctgccatccccatccctcctgctacaccgtcacccacttcgcagctcttgggaacctctcttcttccctcatgcttttccttgcccgtagactagtctctgagctgggttacttacttgggcctagagcatgttcattttaccgaaaaggatactgagccacagagtgttctcactgagccagcgttgaggtctgtttcctacatctgtagaaatttggaagaatctgcgggaaaaaccttaaaggaactagatttaagaagagacggctgggctgggtgcagtggctcacgcctgtaatcccagcactttgggaggctgatgcgggtggatcacttgaggtcaggagttcgagaccagcctggccaacatggtgaaactctgcctctacttaaaatacaaaaaaattagctgggcatggtggtacgcacctgtaatcccagctacttgggaggctgaggcaggagaatcgcttgaacccgggaggcggaggttgcagtgagccgagatcgtgccattgcacgccagcctgggggacaagagcgagacttcgtctaaaaaaaataaaaaataaaaataaagaagaagagaaggctgagtgaaagtccttaaagggaagagacttaccgtgctcccaaagctcattggtggagctgccaggctctagcctggctcaccagctcccaggtctgtggccctacttcattcacccaccggtgatgacttagacccgagatgctgcatgggtggctttagttagacctggggtagaactgtcgaccgttcactggaccgccaaagcctttccctagaaagctttgagaggagacatcttgtggactcagggtttcaggtgcagatcagaccacagacagtgtccccagactccgattctccccccactccttcctctgacacagacgaggcagtggtcccaggccagcacaccttttctggcagacagtacctctggagagtagcctcgtaattcggccttggcattggggaaaggtcagctggggggtcagcttggccttggccgtgcactctggttacaacccaggtggcaggcagcccactcccctcacctccccgggcatcagcagctgcctcccacggacagccgcaagccctcccggttccgcagcacagggcgggctggcacctgctccctctgatccccccactcaaaccctcttgctctgcctctcctcatccgatgcttctccgtatggtttaacactagccaggggtgaagggccacccaagggcttgcctgaccacccagcccgaactggcccccggtcctctgaacacgtccctgtccgtagcacccctggattccattgtgtgggcacatgccgctcctgaactaggtaatgctttgaaataaggaacccctttccatcatctttttcaatactggaaaccatggatgctctggggttttccaggatgcttcaggcgtagcagcagtccctcgggggctgggcccatggagagtgctcaaccttccttgttgaggggtctgagtcagccatggggctgcacatgtgcactgactggcttttctttatgagcggacgggctcaggcctcctctccagggacactaagtgtctccagcagttgcaccccccatgcccgctgctgcctgcagacaggacaagaagtctggacgcttctactcgtttacagaggcggagggcacggtggcagtcacacagggcaaggccgagggccgggcagctccctggagcctcccaagtgtgaagaaggcccaggagaaagtgtggggagaggagaggaggccgccagcgctgggtgaggaacggtaccgggggtcaagggaggctctggaagttcctcaggctgtgcgtggttggtggccacgggccctgttaaccttgttctcgggtttcagtccccacagtgaggccttgtcttcctctcgctgctgggagatccctgtgatccagagagggaacccacagaatcctcaccccacaaatccgcttaggatgggcagagagtgagggcagggctcctccgcagaaggtaccccgcaccccctcactgcttccagccttttgtccttctctccactgagaggctgctggtgtctctgcaggtcggaacgagctgattgcccgctacatcaagctccggacagggaagacccgcaccaggaagcaggtgggcctcaagagacgggtaggggtcccgggggtggtaccccagcaccagtctgctcccaaggtgggccaggccctcccaggaccagacgcaggcttttgaggggcggcagctctggatgagttatccctgttgggcgtgtcacaggtggtccagttttctttttctttcttttttctgagacggggtttcactcatgttgcccagactggagtacaatgacgtgatctcggctcaccgcaaccttctcctcctgggttcaagtgattctcctgcctcagcctaccgagtagctggggttatagtcacccgccacaatgcccggctaattttttgtatttttagtagagacggggtttcaccacattggccaggctggtctcgaattcctgacctcatgtaatccacccgccttggcctcccaaagtggtaggattataggcgtgagccaccacccccggccgggtggtccagttttcttggggtccctgctgccatcacttaggaggaaacccctcgcctctctggaaagtcatcagcccccatctcatccttctccaggacactaggacagacagtaaaacattggcactacttttcttttttgttgttgttgagacagagtcctgctctgttgcccaggctggagtgcagtggcgcaatctcaactcactgcaacctccgcttcccaggttcaagcgattctcctacctcagccttccgagtagctggaattacaggcatgcgccaccacacccagctaatttttgtatttttagtagaaatggagtttcactgtgttggccaggctggtctcgaactcctgacctcaagtgatccacctgccttggcctcccaaagtgttgggattacaggtgtgagccactgctccctgccggcactgcacttttgaaatactgccggtttctggattagctgggcaaggcaggactgagggcccaccagttgaccctttcattcattcattcatttggtccacagatgtgggttgagggctgtggagggcgagagtcaggaagccaggctggggaacacaggttgttgggaggtagagacaggagtcctctctccctgccacaggtctccagccacatccaggtgctggctcgtcgcaaagctcgcgagatccaggccaagctaaaggtaaggaaactgcagtgggggtgctggagtggccaggagtggtggccagcagcatatcttccctttggggtcagggcatcactgctggtgtgcaagtcagtgtgcttttctctctgttgaggagagccaggttgggcctgtaacctctctcccatccgcacaagagggccaagtgtgtggatgcctggctccccacaccctgggagctacaggccaggctcctgctgggatccccccttgctggctcctgcttagaggggctcacacggctcagagcagccggatcacccaccagccctcatttcttgagggcccctcagtgccctcgaccagagcatgcggagtggcaggggcatgggggggtgcctgctgtgggggtgggggtggcgtttatggtactgtgggagctggcaaattccttcctgcttcctgtcctgtgggactgggtgttccttcccttccctgggtcagccccgtcttgcagggcctctgctgataggtgatggctctggggggcctgatgttgctggcattcccctcggggtagccctgctccccacaggagtcaggcctctgggaccctggaaccaggggcctttgggtgaacactgggagggagtgagctctccatcagggaggtgatgacgacagaggctacacagcaagttggtgggaagatctgacatttgaggcattaagtctagaccatttataaacatttttatttatttatttttagagacaggatctgtctctgtcacccacgctcagtgcagtgacgcagtcatagctcactgcagcctcgacctcataagctccaatcacactcccacctcagcctcctgagtatctgggaccacaggcaagtgccactgcacggccatttttttctatttttttatagagatgaggtctccctattttgcctgagcgggtcataaacccctgggctcaagagatcttcctgccttggcctctcaaagtgctgaaattataggcatgagccactgggcctggcctgcaaacatttttttttttttttttttagcaatgtagccccttttcttttcttcccccaacaaaatatcaccctgatgtgttatcagaggagccgttctggtcaaagctaggttggcaaagctcctctcctcccgcgcatcctttcccaccccatggaacttgaactctaggggacctcagaatccagtttaaaagctactgggaggccaggcgcggtggctcacgcctgtaagcactttgggaggccgagttgggcggatcacttgaggtcaggagttcaagaccagcctggccaacatggtgaaaccctgtctctactaaaaatataaaaattagccaggtgtggtggcacacagctgtaatcccagctactcgggaggctgaggcaggagaatcacttgaacctgggaagtggaggttgcagtgagccaagatagtgccactgcacaccagtctgggcaacagagtgagactccatctcaaaaaaagccactgggctagctgggcatgcacgcctgtaatcccaggtacttggaggttgaggccaggagttggaggctgcggtgggctgtgattgcacctgtgactggccacttcagcctgggcaacattgtgagaccccatctctgaaaatattttttatattaaagaaaagccactgaattagatgaccttgaaagtcccttctggccctggcagttcatgatcctgacactggaatctcagaacgagtgggtgggaaccacagacctttctgcctcctaggaagccacaccccactgcccactcagttccattcctcctgccatcagcccagctgttccccaagccccacagctgtggcctggcacctcgctcctttttccctgggacagctgaccagccctcagctgttgctcccgcctctcagcctcagcttccacagccatggaacccagccctgctccctgtttcccctctttcgtctgcctctgactcaccgggaccctgcagatgaccacggtgaacagacttcccactactgggtttagggcaatcccttgggggccggctgtgtggcccacatttgcttcagggaattgtacttgtccttgtccacaggttctgacctggggcccaaggacagccttcagtggatggctggacagacaccaaggggagccataaactccttaaaatatgcaaattttcatgtatatgtgagttgccttggagagattgctgtgaggattttgtcatattctcaaaggatctagaacccaaagtgattaagctctgggttggacagtgatccaatagaaatccctgagtgagaggctgggtcctaggcctggctctgccccgtggccgtgagtgcttgggcagagtcactgggacctcctggagctccagtttcctcatctgtaaagtgacaggcgagcaaggtgacatccaagttcccctcccggccccggttagtggctccctggctccattgcccggctactgctgtcactccccatcgggtccttcccacttcctctgacccctgccccaccctgcccaggccgcggtttcctgagccccagccgtttgtttagatcgagtatccaggaaggcaggcactgagtagatgcagccccggcctcgtgatggagttgttaagtgccgaggtcttcgggctcgcaagggtgcgcctgccaagtccctcatgccctcctgcggggagaggtcaggggctggcctgggcactttcctcctgaaaattccaagtgtcctgggaggagacacacacttagacttactagttagctccctctttggttatcagagacagcctctgagagcaaagcccaagtttggccccaaaaggacagtggggagggggccaaggggggccagggacaaacctcatctatttcactgctttgtccacatcgacaatgacccactactcggaacagttccctactccccaccgccctctatggtgcgtctcccccgaccccttggtttgcatggccccccgtgtgccagtctggtccaagctcacctggtcaccatcaccactctcagcaccctagtcacccaaattctcagagcctcagtttcttcatcttaatgatcctacaagtcctgtcagtctcacaggactcagtgaggttgtgttcttgaaaaccttccgtgggctgcctcatgccacatgggtgaaatggtcaccttgagaggatgagtggaagggcctgctgtgttctggcttcacacctgcacggcaccaggatggcgggggagcactgagcctctctgagcctccctgagcctccaggccgcggtgctgcccacctcatggagctgcgtgtggaccgcgtggaggcatccctcggaagagctggcgagctgcagggctcaccgttgcttctcaacttctgtttttagtttgtgttttagagactccactctgtcacccaggctggagtgcagtagtgctgtcacagctcactgcagcctcgacctcctgggctgaggccatcctcctgcctcagcctcccaagtagttgggaggttctcaacctttgtatcacttaagggagatccaggtctaccaagttaattattattagttattcaataatggttttatctttgtcattaaaaaaaaattcatgggtgggggcggtggctcatgcctataatccagcactgggaggtcgaggcaggaggatcacatgaagccaggcgtttgaggccagcctgggctaatgagatgctgtctgaaaaaataataatcatcataaagatatttatttatttatttagacagattcttgctccgttgcccaggctggagtgtagtggtgcaatctcagctcactgcagcccctgcttcccaggtttaagcaatcctcccacctcagctccttgagtagcttggcctgcaggcacacaccaccacacctggctaatttttgtattttttgtagagccagggtttcaccaagttgcccaggctggcctagaactcctgggctcaagcgatctaccaacctcagcctctccaggagctgggattacaggcatgaaccaccacttccggccaggtatcaaatttctaatcagagcccctgagttgactcagtcgagccatttagccccgataaagctgcagacagtgaataatacttgctgttccagcccgtgtgtgtgtggtcttattttggataatccctgctgggtacagtaacgcatgcccgtggtcccagctactcaggaggctgagatgggtggatcatttgagcccaggagtttgaggctgtagtgagccatgattgtgcagtactctagcctgtgcgacagagtgagaccctgtctctggaaaaaaaaaaaaaaagaagaagaaaaagacacagtttccattaggcttcttgaaatagggaatgttgtgtcattggttttgaagacctttggaattcgggcactcaggatggaaaccactggcttatatgaatataacaaacgattactattgttacccgtgccatccaagtggctttccctgtgtgcttatttgttccgggcctattcagggtgaacccatcctctggggtcttggaacctttggagggcagacagtgggtatttacactctgacacatgaaagatgggtgagtcccaggtgcctacagtgcccagggagatccttagggcaggactgaggcaggaggggccacaggaggtggtctcttgcctccagacagcccgtgtggccagggatgatgcttcctgtgcactcgaggagggatccagcagatattcatgcatcgttttcacaagacaggtgctgagctaggcacctgtggtagagaggtgagcaaggcatagaaggtggccccgtaattaataaaatgacagataatgtctctgtaagctctgatgaaagaagcagggcaagtatcatgcccctttgacagatgagaaaactgaccagagaaaccagctgactttctcagttgcaaaacaagttaatagcacggcacagacttaacgcctggtcccccagctctggccactggcagcgagacagcttccctgacccgagggccggacctgcctggcctcagcctgactagtgaccctgctgaggtcctcccttgcaatgtctcccccaggaccaggcagctaaggacaaggccctgcagagcatggctgccatgtcgtctgcacagatcatctccgccacggccttccacagtagcatggccctcgcccggggccccggccgcccagcagtctcaggggtaagtgggctgccgagagctggaggccaggccagccctctcctcctccctcctccctgttcagaagagccagaagcattggccagcccagatttctctcacctgagtcctcttggccagggcagtcagggaaggagggaacaaggacccaagggccacacacatcccggcttggctggtattgggacggctttcttggggtcctcggcaatgactccacagacttcacaagggggaagggggagcttccaggagctgaccacctggtagctctgccatgttggcctaatttacagatgaggaagctgaagccaagggggctgagcggaagcctgagaccagcatgtacctgggcagctcgtgccacgcagcctcattcctgccctcctgccaggtggagagctggtgccccaaaaacaaacccctggtcagattttaactttcccagccatgaccatgttggccacactctcagaatgatccagaaaggccccttttcagagctgtctcctcacaggggctttcttggctccagggactaaatgagtcttcaaggcacctgcagcaccgccctaggcacgtggggaaggggcagtgccaggccacagcatttttcaaagtgcgtcccagagagcactagtccatctgcatgttaaacagataggacacagtggttctgtgagtaagtttgggacccttggcattaagtgggttcttggcactgggacttttctgagccttaggtctgcactgtgactctgcaggagttgccctgtgctgtgtggaccacacctgggtgcttttcccatggagcccctcctccacagggcctgagagccccctgaaactcactctgggggtgctgctgtggcctgttagcattcactagctaggcgaggcctcgggctccagcctctcctcccagtggaggccctgcccggtcctacccccacccccacaccacagggccccgggtgcacctggggccgtgctgattccatgccttttgcctcctcagttttggcaaggagctttgccaggccaagccggaacgtcccatgagtgagtatggcctctggtttctcttgccagttgctccctgaactgaacttgaacccataaactcatggcattaagcctgggccccagggtgtgctggggccgctgctggggtcggcctttcaggatggctctgagctcagggattgggctcttctactgtcagccatcactgggctcatctgtgatgtctacaccctagggtggtatttgccaaaactccagtctgtccagggtataggcagggccagagctggggtcccccaggggaggaggctgggaagcagacctctggctggcctgggaggaggagagggaggggtggatttcttcagcagacacgctgtgtctgtggacccgccacgaaacccaggggagtcggcaggggcgggagtaggaggccaaggcccatcgggaccactgaaatccagaccaccaggacctaccacacagaccactggacccagtgcagggatccggggcggtggcctgcccgaggctgacacctcccctcctctctctcccgcagtgtgaagcctttctctcagcaaacctatgctgtccagcctccgctgcctctgccaggtgggtgggcgctgcgtggccccctttctatcgcagccatgtggctcctgcctctgggtccaggcccccggcagccgaacgcctgcgtgtccctgttagatgctgccccgtcatgcacactgaccacacgtcctagtccctggccacaccccattcctttcccccagcatgcacacctcagccgtgtgccaagccccttcatgcccctcgggttgccttgctcctgtcccctcaaagctgtgctcagggcttgtggggcacgtgcagttccaagggcagtgcccgtgccctggcggctgccccacttggccggccttgttactgcagtgtgcctcacacacctggtcctgggagggccgaggggtgtctagctcaccagcctggagcccctcccgagaagagggacccttgtgggagaagacctggtggaggcagccagcggtgctgacaggagcccccaccccgccctctcactgacaggctctgctctgtcctcgtctctttctcaggaggggccctcaccacctcccactctgtaggacaagaccagctcctcactcttaaactgccctttctggtgtggagtctgcctgcccggccccttggctttccctgccaccaagagcagccctgctgccttctgtcccccaggtcctgaaggctgctttctctcgttcacacatcaaaacaaagtcacagcgtcaggtcccgtccaccctctgtctcatgccagtcttctgtccacactgaccatgtcttcactccaggcctgctggcttttgcctgcgttcctgcagcagcctctccaccggctcgctgtcccgtctcacctcctctcgtcaccctgtcactcaccagagcttcagtctcacggtgttgcttccaggtttatggtgccttcctggccccctggtgccttcaggacacgatctaaactacagtaggactggagtaggttcatctgttagcaacgctggattgaggggctcttctgggccaggccctgttctgggagcgggggagacacatgtgatgcaaacaggaaacgtccccgtctctccgggatgatgccatattgtaatagtggattcatctggttatttccccgactggaacagaagttgcttgagggcaggaacttaacagtgcctgttctggaagcctctcggtcctgcagggccccagctgccctccagaatccagtcttgctcggcggttccatgcagagtgctgagtggcccgagttgtaccaggcgagcccctccccaccagggcagctccaggatgccctggcccaagcctggcactccctccaccacctctgctaggaggtccatttagggagacaggcggtccccccaggcagcacgggtctgtccgaggaggcctggggtccttgcagagggtgcgggcagggcgggtgtccgtgaccaggttccatgtgcctttctcactttgtgcagggtttgagtctcctgcagggcccgccccatcgccctctgcgcccccggcacccccatggcagggccgcagcgtggccagctccaagctctggatgttggagttctctgccttcctggagcagcagcaggacccggacacggtaggtcctggcctctgcctgtccagctccctggtcaccccctctccctctgtttctgcttccggcagtcttgccccactccatgctggggcttaattcaagttccctgttcctttccgatcttcccttctgcccttccccccactcctcctttcctccttcacgtcacccctcttccctctttccctcctccctggcttcctttccgtgtcccagcgcccagtcagcgtcacgctcctccctccctgtcctgtgttcctcctcccctcctaacccaaccgacccttagtccaaggttgctctggtcccagccccacccctacactgtcccagcctctctctggttctgagaagcgggcaggaagctgaggagtctcctgtgtctgctccatatcctatgggataccagcctgtccccttcggtgtccagtgtcctgggtgaccagcgtcacctgcaaaggtcagagggggacctggaggaggccaaggtgacaggatgccagggcccttctcactctgacatcttcaaacttctttttttttttttttttcttgagacagagcctcactctgtcacccaggctgggagtgcagtggcatgatctcagcttactgcaacttccacttcctgagttcaagcgactctcccgccttagcctccggagtagctgggattacaggtgcctgccaccacacctggctaatttttgtatttttagtagagactgggtttcaccatgttgtccaggctggtcttgaactcctgacctcaagtgatccacccacttcggcctcccaaagtgctgggattaccggtgtgagccgccgcacccggctcagacttctttttagctgaggaacccatgaaccaaatagacctttacttagaagtccaggatgtaaaacaaaaggagtagacttttaccatctctattttactcatggggaaactatggcccagaaaggccaagcggcttgcaccaggtcacgtggtgggcacgcagagccagggttgtctgtctgaccgtctggcctgtgctccgtctccctcagacccactctctccacagtacaacaagcacctgttcgtgcacattggccagtccagcccaagctacagcgacccctacctcgaagccgtggacatccgccaaatctatgacaaattcccggagaaaaagggtggactcaaggatctcttcgaacggggaccctccaatgccttttttcttgtgaagttctgggtaagcctgtgataaccccttctttcctgccaccagcgtgtccgtggtagtgagaacggggcgagagtgcccagagtgtgcccttgtcacagtagaaacttggggaggtggcaccagtgagaaggggagagtaagcccagcatggctatgggatggttggagctgagccgaggagcggggcggtgatcccagagagctggcctagtcgaacgaggccttgtctcacgggtggggatggcagctaagccgggctaacagtggagccctcaggaggtgaggaggtgtagttccagaaaaagacaaacgggaccctgcggggataagtgaagacatgactaggagcgcccttgtcacccaggtctttgaatgacaagtcctgcatgggtttccgggcctggagctggtccttcggtgctcgcgtccaaggcatgttgggctgaacagagcttggagaaggggagggaagtgttggatgggtcacccagctgactctgccccagggcgaggccaccccacaagaaacacccacccagcttctcagatagctcagcctgtagacttggcctctgctgccctcccacctcaccccgggcaggtattttgtgggtggaacctcctccattgaaacgtcttgtctgaggccgggaggtacagtagctgctctgggagcttagcttcctgggggcccagtgtgtgcagaaaaggggtgcgaggagagagtcagacaagtaagtgctaatgaagccagcggtgaggaagggcaggaaatcaggctctgtgactgaggcctccagtattctcaggacacggactgaggcttgggtggctctgcccgcatccctcttccccactccccttcagctctcctcacgctcttttcaatgcctcttgtgcagagattcttaccctttatttactgccagaccactttcataatctcaaagctttacttttcctagaaagaggcatattcacaccgaagtttatatagacgttcagatggcttgccggctcccggtgagcagctcccagcctggctctcatccacagctgaacatgggggcaggctgtctccagaaggggcaagtgttggaactgagacctagggcccctgacctttaagacacttagcatttgcgctctgccagcggaatggaagttggaccctggcctgagggatgggcacatctattggcagagatgggaaaggctgttgcggcctgggagtgcatgagtagtaaaggcagaaggaagtgggctctggagtgaagttgaagccgtaggtaaagagggaataagaggagacaactgggagagtgagttaggttctggaaggtcttgatcatactaaagtttgagttttaacctgttctggaatgaaaaataagtagtattttattttacttggtcttctttttaaatcaatgcatgttcatggttaaaatgttaattaataccaggagccttatttaacgaaagagaatgaagggccagttgcggtggctcatgcctgtaatcccagcactttgggaggctgaggcgggcagatcacaaggccaggagttcaagaacagcttgactaacatggtgaaaccctatctctacttaaaaaaaaaaaaaaaaattagacaggcgtggtggcacacgcctgtaatcccagctactcaagaggctgaggcaggagtaatcgcttgaacgtgggaggcggaggttgcagtgagcagagatggcggccactgcattccagcctgggcaacagagcgagactgtctcaaaaaaaaaaaaaaaagtgaaaagcatcatattcttgtcctactcctccccacacccaaatcccaatccccaaaggtagtcactgcaaatttcagctgtttattttgggctttatctctttagttctaagtaatatgcttatattgctgtatctcgatgtcaggattaagacattatattttcatttcattatggtagaaaaaattagctgtgttacatcacttttccccctcatcatcccaatgtaataatatccaataagttatttaatttagtaaaagtcataaaatgttcactttttttttttgagtctcgctctgccacccaggctagaggtgcagtggcgtgatcttggctcactgcaagctccgcctcccgggttcacgccattctcctgcctcagcctcccgagtagctgggactacaggcacccgccaccacgcctggctaattttttgtatttttttagtagagacggggtttcaccgtgttagccaggatggtctcgatctcctgacctcgtgatctgcccgcctcagcctcccaaagtaatgttcacattttttgacaatgtagattgaacaccaaagagccaagaacgggctgggtgtggtggttcatccctgtgatcccagcactttgggagcccaacgtgggcagattacttgagttcaagaccagcctgggcaacatgatgaaaccccatctatacaaaaagtagctgggtgtggtggtgtgtgcctgtggtctcagctactcaggaggctgaagtaggaggattgcttgagcctgggaggcagaggttgcagtgagccaaaatcgcaccattgcattccagccgggtgacagagcaagaccctgcctcaaaacaaaaaaacaaaaaacaaaacaaaagtacaaagagtcaagaagggtattatgattacatttttacctcttgtacaacttttttttcctgcaaataaatggctcttgcatattttttaataagcctattcttaaaattttacaaattgctccatcagaaccaccatataaaattaaaatttttttcccccaaatattcaaaactgttagataatttatcaatttctcctttcttctggagatctttctcctggctgcctctgttctgctccagtttgaacgtgttattctttttttttttttttgagacagagtcttactctgtcgcccaggctagagtgtagtggcgcgatctcggctcactacaacctgtacctccctggttcaagcaattcccctgcctcagcctcccgagtagctgggattacaggcacccaccatcatggctggctaatttttgtctttttgtagagacaaggtttcaccgtgttggccagcctggtcttgaactcctgacctcaggcgatctgcccacctcagcctcccagtgctgggattacaggtgtgagccactgcgcccggcctgagcatgttattctctaggcttgccctacagttgtcatcctgagcctcccctatattgatacaatttcctagctcttgcatttctctctttattggtataaccccttcattttgtgggaacacatcctctagtaccttctaagaaaagatgcatggtacataaatgaccttgcttctttgaaatgtcattatttttattatatccttatacttgactgattggtattggtagtctggataaagaatctagatcatacatcattttccctagaaaatgatgacttttttttttttgagacagggtcttgtttcgagatggagtttcgctctgttgcctaggctggagtgcagtggcgcaatcttggcttattgcaacctccacctcccaggttcaagcaattctcatgcctcacccttgcaggtagctgggattacagtcgtgtgccaccaggcctggctaatttttgtatttttaagagagatgggatttttcagtgttggccaggctggtcttgaactcctggtctcaagtgatcctcctgcctcggccttccaaattgctgggattacaggtatgagctatcgtgcctggcctagaaatgattttcgaggatcattctttagtgcatttgtcattatcttctgacataaatagtctgatagcattctaattccctatcctttattatgtaacttttttttttcctctggaagttgtaatgtttcttctttctccctaatggccagtttcacattggtgagctttgggatatgtgttgttttacttccccgtcttgagccaggtacttggtaggcacttttaactgtgagatgagtctttcagttttaggaaatgtactcgtattatttctttgataatttatttccctctgttttctgttttcttttccaggaatctctgttatgatgttggaaccctctatgatgtttaccatttctttattttcttggacttatcctctacgatttttaccatttattttcaatcttggtctgttttcttagcgatttccttaattttgtattctgactcttttctgaattagttaaggttgtgtccaagtgcatatcacacaaaccccaaagaaacagtggcataaatagtttttctttcacatcaaggaagtctggaggtaaagactgtccagtgctggcccagtgctcctgacatcatgagggacctggcttctctctatctgctgtcctcagtgtatgacttctgtactcagggtcatgactgctggagttccagccactgtagccatcttccaaccatcaaaagaagccagtttagctccctgtaaggggcctgctgggaagccccataattagttgtgtggctgcatcttgccgtaaggaacccgggaaaggtacttttttagttgggtaagttgctgttctgaataaaatcagagctgtaatactgtagaagaagctgcatacatccttttatggatgtatcttagttcagttgatgacattttgttttttctgggtagtttataaagtgtgcatcctacagttaagggtgaattagatgagtggaatacagcagcatctctgccacaccttctgttgaatatttaatttcggctctgacattttaattttccagagctccttcttgttctgtgattgcatcaagatgtttgatggatgtagtttttctcctctttttcttaaaggtatgaagtaagtgttacttcttaagttttctcctgctcctaaccctcccccaacccacgcccagactaagttttgctgtgttgcccaggttggagtgcagtggtgtgatctcggctcactgcaacctccgcctccctattcaagcaattctcctgcctcagcctcccaagtagctgggattacaggtgcccgctaccacgcttggctaatttttgtatttttagtagagagaggggtttcgctatgttggccaggctggtctcgaactcctgacctcaagtgatagatttacaggcgtgagccaccacacccagcctcctgctcctttctttgtctttgtttctttttaattccgtttttctgtttgttttggtccttgtctttccagctggagggttttctttggtgtctttagttcttagctgcctgtctgtatttttttaacagctttcttgcaatgtaattaacttaccttacagttcacctacttaaaacatacaggccacgcacagtggctcacatcttaatcccagcagtttgggaggccgaagcagacagattgcttgagctcaggagtttgagaccagcctgggcacatgacaaaaacctgtctccacaaaaataatacaaaaattagtcaggcgtgatggcatgtgccagtaacccctacactttgggaggacgaggcgggtggattgcttgagtccatgagttggggaccagcttggccaacatggcaaaaccccatctctcctaaaaataccaaaattagccaggcatggtggtgcgtgcctgtaatccaagctactcaggtggctgagatgggaagatcgcttgagcctgggaggcagaggttgtagtaagctgagatcacaccactgcactgcagcctgggtgacagagcaagatcccatctcaaaaaataaagtatacaattccgagtttttaagtatattcacaaagttgtgcaaccatcaccacaatcaattttagaacattttcatcatcccgaaaataagccctgttccctttagctgtcactccccactcctaccccccagccctgtgcaataatctactttctgtctttgaagctttgcctattctggacattttgtataaaagggtttgtggaggatgtggtcttttgtgactggcttcttgaacttggcatagtgttttcaaggttcaaccatgttgtagcacgtacgttcctttttatggccaaatgtacggagagtccacattgtttatccattcatcagttcatgggcatttgggttgtctcctcttggctgttaggagtagtgctactgtgaacattacgtaccagtgtttgtgtggacgttcattttcatttccatatgcttatgtctggaattactgggtcatatggcaactctctttcactttctgaggcactcccaagagtcttccgaagtggctgcaccgttttctgttcccacctgcagggtatgagggtatgaggatcctattttctccacatcctcaccaacacttgatattctctgattgtagccatcctagcaaatgtgaagtggtatctcattgtggtttttatctgcatttccctgatgactgatgatggtaagcatcttttcatgtgcttactggccattcgtatatcttctttgtagaaatgccaattcagaaatttaggtccattgcccttttttttttgagacagtctttctctgtcacctaggctggagtacagcggcgtaattttggctcactgcaacctctgcctcccaggttcaactgattctcgtacctcagccttctgagtagctggaattacaggcacgcaccaccatgcccagctcatttttgtatttttggtaaaggcggggttttaccatgttgtccaggctggtcttgaactcctgagctcaagcgattcgcctgcctcaacctcccaaagtgctgggattacacgtgtgagccgctgtccccaaccccattgcccatttttataataaattgggttattttttattattgaattatgagttcttagttctggatgaaagttccttatcagttatatgatttgtaattattatttcccattctgttgaatgtcttttcacattcttttttctttttttcttcagagacagggtcttgctgtgtcttccaggctggagtgcactggcatgattattgctcactgcaaccttgaacttgggctcaagtgatcctcccgcctcaacttcttgagtagctgggactagaggcatgcactactacgcctggccaattttttttttttttttttttttgagatgaagtctcactctgtcacccaggccggagtgcagtggcatgatctcggctcactgcaagctccgcctcccgggttcacgccattcttgtgcctcagcctcccaggtagctgggacttcaggcgcccgccaccacgcccagctaatttttttgtatttttagtagagacggggtttcactgtgttagccaggatggtctcgatctcctgacctcgtgatccaccagcctcggcctcccaaagtgctgggattacaggcgtgagccaccgcgcccggcccaagtttttatttttatttaaattttttatagagggtgtcactatgttgcccaggctggtcttgaactcctggcctcaagtgatcctcctgcctcagccttccaaagtgctgggattacaggtgtgagccactgtgcctggccccttttcacattcctagtagtgtcctttgatgcacaaacgtttctagtgttgatgatgtccagtttatcaagttttccttttgttatttgttctggttatatttagtagtgactgggagctcttcgtgcaaggtaggacttgtcacctggtgggtttcgctttagggtgattgggcttggggagctagctgttttattggggaaatcaataaatatgtgtgtttactggacttttttttccccctgaggtgatttagtttctccagagacgattcatctaatttccctggaagggacatacttggtcacaagtgttctggtagtgggataaagggtcgggggtaggggccctgaccatttctgatgctggctttcacttaactctcctgttcttactccccctcttccctctcttttgaataagccctgtgtccctgagacctgttgccctcctgtttaatttctgaagatggtcaccctttggtcctctttaaaaagtttttttgtttgttggtgtgttttttaatttttaatttcatagagacagggtcttgctatgttgcccagactggttttaaactcctgggcttaagccattctcctgcctcagcctcccaaagtaatgggattacgggcaggagccaccatacccggctgaccctttgatcttctaccgatgcatgggaggggtgggcctgggggctggactgtccagtgtacagactttttgtcagttcctggggacaaatcctgttccctccagctccgagccacgcagctcagcttcttatctgtcacccctgaagatattggtaggttgtgactctttttgctttctctaccccgtggaatccagtgtggtcctaatcagctttgagtctccaaagcttgcccagctctcttgtcagctggtctctttgttttctttatctttgtggtgctgcatattgtttaaagttacttgctgttgtccttctagctgggtctctggaaggggaaaaaataaactggggtagtcagtctcccacctttagccaggtgtccaggatgatggggtgacctgtgtgccacttcgaaggggtcggcagtcgctgtttggagtgctgggctgagaaggctctagcagggaggagtgctgggtggacggtcatggccacgtgcgtagccagggaaatatttgttagcccttctccttaagcgatgaggagtcatttaaggttttcgaacagggcaggacgtggccagggttgtgcttagttggttaactctggcacccagactggaagcaggtgtgagactcctgcagtggagaccaggcaagacgcatgtgcctcctgaggacctcggccgagaggctggcttcagggtgtggcgtgggaggcaggatgctgtccactttttctcaggaggggcttaaatcatctcccagtctcccgtccagccccggttgtgggaattggaacctgtacagctggcagtggcgcttcccaaccctgctgtgagtctgagggggcccccagccccctggagaagccttcacccttgcttgagcactcaccgcccccggcctgtccaggctcagccctgactcagcggaaggagcttaggcgagctgatctgtggctctttcccggcatggctcaggaccctggggatacagttggggtcagagcggagacccagttggcagtggcaggaagcactcatgggaacactgccttggagcgggaggtggcatgtccgggaccctcttgcactagctcctgcctttagctattggtgatattctgtgttcttctagccaccctccagataaggaccatcctaggtctcttgtttcacaagtaggggaaactgaggcatggagtaagcagggcctggccctgagtcccccagccagggtgacctctgtcctgtgggcactcctgttggatacatgctgtgagatagatgggcccagatagactgagagagatgacagctgcactcttctcaccacgttacatacagtcacacgtctcatcctcaccacagccaagactggataacctcatctgcagaggggaaactgaggtacagacaggtagaatcacctgccaaaggttgcccagttcatagtaccagacccataccagaccacgggtccatacctgagcagcctgaccccagggtgtgtgcttggagccaccatactaaacagtcctccttgcgaagtcactggctgccctccatgcagcatcctggagcttctcctgctcccactggagaaggctctgaattgtctaaaacagatccccagccccctgaggaacagcaggcagtggcagcgtggggagagcagacttagctctgtgcagtcaatgtagagccagccccttgggcttcttgggcgttctcgacctcagatatcccttccagaaaatagggcagtggccctgcgtggagactaaggttgccaggaaggaaggaggacctagaaggtacttttccaaacttggtagtggcctgtgtcctctctttctttctgactcttaggggagtttggaggtgggggttgatgggagaagagagggttgggacagctggtgccaaagacatgggattcagcaggttcccttgtggaccgtgtgctccagccgtgtgctgtacggacccagcgcggccctcggcttccaggagctcgcactctggatgggaggatccagcgcgagtctcggggtcctgggacaggagccgctggacagggggctgtggtgtgccccccagcaaggcccttctgatgtgtcatggcagggcacggtgggcagcagttggccccagctggggcagagtctcagttctaccacttgagaactgtgtcctgggcaaatattggcttctctgtgcctctgcttctttgtgtgaatagtcagcagtttgatcttggggacctgccaggggctgtgtcgctgaagaccccgtgtatgtggccggctggtactgagtggggggctgtggcctgcccttgccccaccccttgcctgagccctctgagtgccagcggcctgggcaggtgaaatcagagatgagggagcgccggaggccagggcaccttggcggtcatctgctccctcctccgcatgtgtggggcgggcagaggcaccagaggaagacacatatgtgacggggaaaggtacatattcgtgtttgctgacaatgagactttgcgtcaatcgtgggtcctcacaggctgccccggctccccccgcatcgggaagctcctgtcttctgctccctggcctggtcccgccttccccctccatcagctggtgtgaacttggccacacacagttaggaaggaaaactgctcaggcaaggaaacggtgtcgcctctcccggagcctttcttttcctgcctggctgttttctcagtcctggctcccaggccctgaatgtgtgtgctggagaggcaatcagaacccccttggagtgggaggaggacttgtccgtctccagtccagcctccctgcctgtcccctgagttactgctcttactgagggcgctgtggtggtcattcatagactctcggactgctgggacacatttccagctagaagtggcatctgccagcctgaagggctgaggctgctagggctgtgcacagcctcagccctatctgctgagcgccacggggcctggagcgagggactgatgcgatgaagctcccttcctcccccagagccccgcaagtccagcagaggccacctgtctctggggccggtgagagggggcctttggtggccattaacgccgctctgcacattggaaatgccaggcagagccgggctgcaccgtggaggcagcagagtaccccaggccttcctcccatctcagcctgctcttccctttcagtccctgacatttctcccaggcacataccagcacatgacaatgaatctgagcccctccaggcccccacacccgggctgcggctgtctctgctcatctgtcagtcacccgatcccccacacctgttccaggcacagctgcccacccgcacgcacagctatgaatagggcggagggagggttgcaagggggcactcacagggcaggggaccggggcagctctcattttttcttaggccaagaagcgtagcttgttttgggtggttgctcagtgtggggggatatgagggtggacaggaaatgtcaggaaggagtatagctgcaggagaaggggtgaggctgtaattagaaggatccaggcactgaggacgagtcgaggtgctctggggcggttcgtccgtgtcgccggctggtgtgttccgggtttatgcagtgtgaacatgagttctggggctgattgtgggatctctctttctccccctgacccattgctcaaccctagcacttgcattctatttgttctcccgattataaattccctgagagcagaaacaatgtctcaacctctctgggcccccctgcctctagcactgctggcctgggctggacaaatgggcacctgagcgatgggaagagccagggagtgggagctgatgacagaagagtgtatctgagatgggggtggagctggggcgcagaactctcagggtgagcaggacagggtaggttcctgcttgcgcctgagggaccttgctcttcccactggtgccacccggaggtgagagggtgaacagccgcctgcaaccttgattgaaggcccaccctactaaggccctgggagagcttagttcttgcctccagggagcatcgtatctggaagggggcaaggacatctggacagattatgacaagcagggtaatagagggggatctgccaattgctcctgggggctgggggcagccgctgcctctgtgtgtctggaagagctgggaggtgtggatgccagtccttcccagcttggcacactggattcttctaagatggcacgtgaatatgcatttttttaaatagttaagtagttgcccaggctcagtggctcattcttgtaatccccccactttgggaagctgaggcaggaggatcacttgagcccaggagttcgagaccagcctgggcaacatggcgaagccctatccctgtgttttaaaataactttatttgaaaatatggaaaatagttataggccagacgcggtggctcacgcctataatcccaacactttgggaggccgaggcaggtggatcacttgaggccaggagttcgtgaccagcctggccgatatggtgaaaccccacctctactaaaaaaaaaaaatacaaaaactagccgagcgtggtggtgggcacctgtaatctcagctactcaggaggctgaggcagaagaatcacttgaacccggcaggcgaaggttgcagtgagctgagattgcaccaccacactccagcccaggcgacagagcgagattccgtctcaaaaaataaaattaaaaaaatagttatatagttattttcatatatattagaaagaatagaatccttgatttcatggatttattgcttagaatggaattaaggaataaaagtgagttgatttcaaagaatcaggatgtgtcgtagatggcacatgaatgtggcattgatcagagggaccatgcgcggttaaaatctgagggtcaccaccattgatgcctggcctcacctcttggtgttccccaccatgtccagtgcatccttcccaggcagctgggcttcctgccagcggcatttcaggcattgttcacatttttgccctgtgcttccagctacagaatatgtcctgagcacacaaactgtcccccaggccctttttaggaacagtctgacaaagtcagtctcctaggaggagcaggtgacttcgagaaaataggagacaggccaggtgcagtggttcacacctgcaatcccaacactttgggaggccaaggtgagaggatcacttgaggtcaagagtttgagaccagcctaggaaacagcgagaccctgcctctacaaaaaatttaaaaattagccaggtgtggtggcacatgcctataatcctggctactcaggaggctgaggtgggaagactgcttgaatccaggagttcgaggctgcagtgagccgtgatcataccactgtactccagcctgagtgacagaacaagattctgtctttaacaaaaaaaaaaaaaaagaagaagaagaagaaaacaggagcccgaaagcctgggttctggtcccattcaccttatatttgcctgtaagaccttcggccagtcacagccacagttaaatctagtccggcagaggcctcagccacctctgccatgccatcctgggcaccctgcctacaatgtgtcatcccctccctcccagcatcacagatggagacagagtggggagactgaggccagctcaggggtggtagtggagggtgtttaggataaatgctgctgtctgtttcagaggctgagcattgacacgaatgctttttttccctaaaggcctcatcaaagccgaggcaggtgcactgaaccatatgccattctgtttcagcatgaaaacagcctttttttcctcatcataaacgtaatccaccctcattctgctccgtagcctgctttcccactcagtgtgtttgtagtcatccatgataataaatgcaggtccttctcagcgtttttttgtggctacataatgtttctattgtgctatagacaatcaacacccaccgccagtctagagaaaggtcctgctctgggaaaacttctccaaaggagagaaaaataacgattgagtgtcccctcatggccagtagtagaattgcttggtgcctggctctgaatctgaccaaaaccttcctggggttctagggatccccttatctttgcacagaagagtccttggtgtcagaaccttgaccaaggcctgacgctttactgcattcgtagggctgcgctctgggcacagcttgcagtgatttcagaccggggtgtgggtgggaggagcggcctcccctgagaataagcctttgtaatgtgcctgtgcgttgtttctgagtcttgacttgttctcttagcacccctggctcagatggggtgatttgatgtggggctggagttctgggcatggggacccctaaggcgtagggcttcaggaatacaattcctgcctcagagtccccaaagcaccaaattgtctcatctggtgccttcctttcttcgctgtggcactctgctggtttgggacaagtattggggttggaggctgaagacctggggtctttcacttactagttggatggtgttgggcaaggctaacagtcaggacccctcatggataaaaccgaggccgtggttttgggtgtgagatcagcacagagtcttactccgccttttctagaagggaagtttcagatcagccccacatccagcaggaggccccctgggctctgttttcatcaggggaaggaagagcagcctgtctgaggcaaggtgagaagctgacctagaggaccagtgtctgggcctgtgaagggccttgtgagccaggccggggaccaagactcctgtcccttgtggctaaatggctcaatgagacggtgaagtgacttgacttctgaagagattcccggggcagttaagagaatgaaccaaagggagggacagctggtgctggggagattgctctggaggctgaagcagagatgtcaaaagatccaaggtgacgggacccagcagtgcctagagggggaagaggccagccccagagccgtttctgagggagcatcgatcaggtctctggcgagacaagaggatgagacaggagcagcattcaccccttccaccctccccactgccggtctcttgccctggttttctgttctcatgcttcctgcactatcaaaattgactctggaataattctgatagacgcattcaaactaaaatagagctgactggtagagattcaaacctttgcagtttaacaagaacaaagtcttagactatgaaacttgaaatcttaaagatggaatctggggctcccacctgctgggtgtgttaatatctgggcaggcagcagtggcctgaaactgtgtgggtcccagtgtcctcttttcccatgatttaggcaacacgacctgattttgtaccaggcagagatgtagaggaatgtggaagctttctggcgtcctactgtctaccctcagtctgatttcttcccagccctagagccgggaccgggaccctgaggtctccttgatgctcccgtctgacatggcacctgctgacactccctcgccttcccactgtctccctccaggcagacctcaacaccaacatcgaggatgaaggcagctccttctatggggtctccagccagtatgagagccccgagaacatgatcatcacctgctccacgaaggtctgctctttcggcaagcaggtggtggagaaagttgaggtaggaggccaccctggcgggtgagggccggtggcagtggtctgtgtttgctgggcatggcttccatttgctttcaggaggaatgccctccgttagggagccaggataatcccttgttgccttccctgtctgctgtcagtgctgtgtgcctcccacactccccttggcaccagtgtcctgcccagctaaccagagccattgctgccctttcaggatcttccaagcacgtccttgcaggcacccccggtcctctccaagagcagagccgcagcacaggcagagccctgggcatctacctagtccagccctctggcttcacagtggaggcccagagagagcggaggcctcccaccaatcgcccgcacatggtcacacagctcattagtgcagaagcagggctaagatctctgtcccctgctcactttgaactccatgaatgcctaaaactgttccttccctgattttctgcttatgggtaccctggagaccctgctctaatggaagttacagaaaattcaggcctgccttttatggtttctcccactctgctaaacccccggccaagggcagtgcagggcagtggtgaggagcataagcgcaggtgaatccccacccaggcaccctgctttccggtgcgtgtctggggggttgtgataaaatcctctgtattttggccctaaacaagggccaagttatcttcactgtccgtgacacggtctcctgcagcaccctgtgttctgggcccgctgcgtagtggcagtgacaaggagctgggactgaaggcctccaacccaaagcacctgtggactctgagagtccggggccctgtgccgcccacacacttgttaaacctcctcaccgtgcaggccagtcttcgtccctctcctcaccccttccccagattggtctgaattaatgaagtcctactctcacagtctgtcagttattgatagccttcctcatgccaaatgcagccagatgcccggccagcaccagggaggagacattactccacacagtgcttctccgcctggctgcaccttgcagtctcctgggagctttggaaacacaccagtgcctgaaacccattcatcacccctcagtctctagggtagagtccaggcattagtggtttttaaaaagttcctcaaattatttatttctaattaaacttgtaaaacttttgagataatggtggatccacttgggctcataatcccatgtgcgctttacccagctcttgccctggccatatcttgcataactagagtgtaaagtggacaaccaggaaattgacgttgatgcagtccaccaagctggttcagatttcaccagttttatcggcactcctatgtgcgcttgcatgcgtgtgtgtagacagggaaatttgcatgatcaccaccagactcccaggggtccctgtgtgcccctcatggtgtcctcatgtacagtcaggattgagaggctcctaccactgctcctgtgtctccttaagctcccctcctgccatccccggttcctgctggccacccatggagaaaggaggtcttgtttaatgtccaccaacctaagagggtgactttctttttttctttttgtgagacagtctcactctgtcgcccaggctggaatgcagtggtacgatctcagctcactgcaacctccgcctcccgggttcaagcgattctcctgcctcagcctccagagtagctgggattacaggcacgcgccaccgtgcctggctaatttttgtattttaatagtaacaaggtttcaccatgttggccaggctggtcttgaactcctgacctcaggtgatccgcctgccttggcctcccaaagtgttgggattacaggtgtgagccactgcccctggctgggggtgactcttttcttaagggcccccaggctttctgcctttccttcccgtggagttgggtctgggctggaggtggtcagaatgggattctaagcccctgctctccccgggtcctgcagacagagtatgctcgctatgagaatggacactactcttaccgcatccaccggtccccgctctgtgagtacatgatcaacttcatccacaagctcaagcacctccctgagaagtacatgatgaacagcgtgctggagaacttcaccatcctgcaggtgtgcggcgggtgctgcgggtgtggctggagtctgtgtgtgggtagcagccatggcatgccccttctggggccttattaacccttgtctttttctctcccacaggtggtcaccaacagagacacacaggagaccttgctgtgcattgcctatgtctttgaggtgtcagccagtgagcacggggctcagcaccacatctacaggctggtgaaagaatgagagactcggggagcagggaggggggaagagacgtgtgtgcaggaaacggggacgtggggaggggacctgcaggggcagccccctgaagtgccaagagagctgagaggagcagttgtgactctacccaggaacaaactgtgcctgaacctgaggtgcccaaccccaaataaacccaagatgctgtgtattttcagagga

SEQ ID NO: 71 - DNA, 73671 bp, Mouse
gcgaggcgcgccccaccccggcggaggggacggttttcggctggaggtggtggagagacagttaggactcaacgcaacccgggggtgtggggagctggatgagagcgggaaatcggtagatcagagtcaaggggtgtgggtgcgagcggcgagaggcgccgaggggtccgcggggttcccgggtgtctccgccgtgtcctgtcccgtggccgcccgcggttcccgggctccgcccagccgtggagcccagcctctctctggcccggtctcctcccaaaggtgcgggtggcagcgccactccctccgctccctccccagccgcgcgcgtctcattccagcgcccattccgtgcattcctgccgggctcctctgcaaactccagtcccgggggtggggaccggcctcagctacgcgctcggggccccgcagcggtcgccgcggctggaagacttggcgccccgcgtggacctgccgcagccggccgagctctcccaccccgcctcccgaaccctgggaccggtaaggctgctgagttcggaggacacccgcgtcccgcgtggtcccgggcaacactagggggccagtggggcacgtgcgggcggtggagtctaggggctggacagagcagggtcgctcggctgaagttgagactaacgagcctcagccaggcccttttctacttttctgcctggagaagagagcccataagggaggtgtattgcctggaccttgtgcagaggtccccagggtttgagacgccgttgctccccacggtgagaagtgatgggagtgatggaccggagttcccaaactccaaggcactatactctagcaggcagcccaggggcgcgcgccgcggtgcacacacgtgtcagggggctccaggcacacccacactccgtccgattcagtgagtgagttcaaagataggtattactgcgccagcatccttaagttttgggtgttcccgaggaagagatatctgtgcgcagtgactcaccttgcttccaggaggaggatttgtttgtgctaaacgcgaccctgtgtgcatcgctacttgaagaaggtgcttgtctgaaatcccgagtgtcggagtgggcgtgggtgtgcgatgcctcctctccaggactctcctctccaagtcctcgctctgaggatgttggttctggctctgacttcttcctgaagaaccgcggcaggggacaatgtctccaagttctttgtgttcagggagaatttgacagtagtagttggaggtgcccctcttgccatccctgctgggttgagcattgctggcaggaagctgcctacacctgcccccttccaggcagctgtctctgtgagggagtgtggatcctgttctggcaaaatccttagggaactgctggtaggctaagcaaagctgagatctttgtttgcccttaggggctaggatggtcatgtttatgggggtggaccccctaaaaggagaagagcttgttaggttgtttccttttgagacagaagtttcctgcagtttaggctggcatgatacgtccaccttagtaagaggtggctttcattctcctgccactttttttttttttcctgagacagaagcaaaagaccaaggaggccttgaactcacagcagtctcacctcagccttctaagtgctgggatgacaggtcggatttaccaggcttagttgaccactttggatactatttgttgagtggttggtagtgtttctaagttgtcttcaaggacaggggagtcagtgctacctgtgggaaccttgaagcaatgagggggagacaatctctcattcctcaatagccagggtcttgctctggaacccagactgggtccaaactggatgatcctctgcctcagtttccccctcgttcttcacagttagctaggctaccttgtttctgtggggaaacgtgagtggtccctatagggaatgctttagtgacagctgggaaggggaggcagcctcggacttggtagctgaggccaggatattgacaggagagtggtgtgagagtcacagacagacttggcaccagtgttctcgctcattagcacaactcctaggtgatggctagggtttcttggaaggaaggaaggaacagagaaccctgtcaggagcgagggggaggggctcgtgtttacctttccttctctcctgctgatatagattagatagtctattccaccctgctcgggccatgcctaggagagagacactcttatgggttaagatcatgggttaagaaactcacaggcgtggggtcagacagactcaggcaggaatcttgatattcactacctttaaggctcctgggctccgtttcctgatgagtaaccctggggggtggggataggggtgagtaaccaaaatcagggcagaaagcttgctctgaaaactcggtgttcccaaagcatctgtcagcacatcctggtgcccctggagatggtggatcctatgttttcctaagcttgctttggcgaaccccctcctgctccccctttccatgttgagaattggacccagggtcttgtaagactagcggattttgcgtgatggttccctgggcaccctttgggaaaccttgccgtgtatcgtatttattttgcccatggcacggggcatttggtggggagacttccctttgccaccaggtaacgtacttctcattctccagctcccatattctcatttccacttttgcctgccctcaggacatgtttgctgagcactgttggagcctctgtcaatgcccagcccctttgtggggaaactgagacctggggagggaccataacgtgtttagaattgcacaagctctgagtggcagagttgggaccggaacccaagctcttcacgttggattatgtctcctgctttgtgcagcccagtatctgggtgtggagaccctaaccactttcatctaatgtgtgtggagactgtaacagtctgatctggatggtgtcttccatcctgtgatacagatagatgtttgcaggcaggcattttctcttgtatcccagtagaaagtatacagcaaactaccccatggtaggatataagcatggcagtctgggagaatatctggatagctttcaaatctactgtccttcctctaaaggtctaggtatgtgttgggggtatgttacatatgtacatatgcatgcatgcatctatctatgtaactatgtatgtatctatgtatgcaattatgtatctatctatgtatctatctatctgtctatgtatctactctttctgtcattttgcttttttggtctagggatgagcccagagcctcaagtttgagcttcaattcacagctctatcttttccatctctcaggatgcaaatgtcacagcctcctttggcctccattctgcggtcttgtgctggtgactgtcacaaagcaacacctattgccaaacttgtgtctcttccttctcaggggaggtagaagacatcagttcctgactttggacctcacccttcccggaggtgaggccagtctggtggcagttgggaacttgggggatcctgagggtggctttacctctttgcccccttgaccccttgttggcagaagcaggaacaacggctctgtttaaagctctgaaattggagctgaacagctgctccccggcaccctgagggcgggggtgtcaccagctcaggggcccaggtggaggctggggtagggcaggctgcctgcctgcctgcctgggagcatggagtctccatctccagtgtagccctgacatggcagtttttccttgctgtgccgtctgtctttaaggttgtacgttgaggagagtctaatcgcacctgtgtggttgatcctggggctctcagcgagtgggccaggatccatgggaaatttcccaccagaactgcaggccaagatctgtgcccatctgtttgcttgtcatacaggccagtttccagaaaggtaggaggatgagccagctccctggtgtgggccagctccgtggccagggtgggcaggctggtccccatgggtggggacccggcttcctttgacccaaacgcaatgtgaacaatagacttcagaggagtcaccaggggcaggaaatgggagctgtgctaaggccagggtgaccctcctggggggggatgggattgtatccggttgagtgttagggccagtgcagagggcactggggaggggctgatgacacacagggtgggccctggggtggggctctccgcctaagggggctgttgactcagagtgaaacctgagcaggagggcccattctcagactgagcaccctgttgtgtgtcttaccagcaaagatcttgtgtctggcagcctcttctgccaggttcctgccgggcttgccaggccagaaccgtgcctttcccttcccctggagcccccagaatggcttcaggagttgcctaggccgggatgaaagactagtgttgtttcttcctggctgcattccaacctggctgtcctccactttggcattgagccccaagtagtagttgatgggcaggtaatgctgggtagggctctgggtaagggagacagcagccttgggtcacttggacaactgggaagagatttctaaattcacagtcagtgcaagacaggcagggggagattcctgcctaaggcaggtggtggaatgttctagcagactggacacttatcttgccaccatctgtgggagggtgggacagactctgtgtgagagctaaagtgcacttggcttggggagaagcgggtgcctttgggccttggagtggccataggaccactgccaggacccaagagggggtggggcagagaaaacacatgctatcttgatttctttctccaagggacaagatgagcatcctggaaatggagcactgggcttctccttcatcctttgtccagttctagatggttttattctatgtatctgttggttggttggtttgccatgctgagattggatcctagggtctcatacatgcttggctggtgctctgaccccagccttctgtcagagttttacacaaaatctctaggaaagaattgagttcaaagtaacaagtctctagcctgtgtggtctttggatggagaaattgtctttttctttcttttttccgttggtggtcctgggactggaactctgggccttgtgcatgctagatgatctctatcactgagcaacactgtaacctttcaggaaggtttgtcctggcaacaaaagagactgcaatgtgtgtctggctaaaggactagcccctagccccaacaatcatccctccctcccctctcgcccaccaagagggagattcctagtggaagacaccacagctctctctagcttcattctgtcagccctgtgggtgttgaagatagtaagcaagctctggctggcagaaccaggtctgttttttctcatctggctagaattttctaggaggttggagattaagcaaaaagaagacttttgttgttgttgttgttgttgttgctgtttcctttggttttgtcttttgagacagggtttctttgtgtcctggctgacctggaactcactctgtagaccaggctggccttgaattcatgagatccacctgcctctgcttcccaagtgctggggttaaaaaaagtctccgttgcctggtgacatgtaatttttgtttgtctggaaaagcgttttcctccagtgctagagagtgaactctgggacttgagccccatcccgagacctttcaactttggctgtattgttttccaaggccagtttctcaagttggtttcaaatccgttgggtagctgacaaggacctggaacggaagactcccacaggctctaaccccctgtgcgggttacaggcatgtgacacttcacctggttaggtagtactggaggtagaacccaggactttgtgggtgccaggaaagcattctgccacgtaagctacattcccaactcttacttttttgagacagaggcttaggtagcccaggtggacctccataacttaggaacaaggcagtggaattatgaggtctttcttaactctatgacattctacccatgccaagagccatgtctggcatttaaaggagaaatctattctctcaggaagcgtgtttgctagcctagtgtgcttgcctagatagctcgacagagcactggatttcattcccaggacctctaaaagggaaaaaaggacaaaattaagttttctattttatttatttatttatttttgtatgtgtgtatgtgtgacagtttttgtggctttaagtacaaataaaatgtctattcgttttctttgctgtgtggtctgatggcctgttgccttggtgactgatagccatctctgctgctctgtgcatgatagctttgtggatcttggagaacgcattgtggatgatctgagcacctatctcagcacagtaggatttgggataacgtgaggagcacttcagctccttgggtttgtggaccaggaacttcctgaagcctctgagcagagtgtcctcattgtcctcgttgtcctcgtcgtaaccaatgctgggcatcaggatctggccttcgaatctcctccacacagtgttgtttatacccctgggttcccacacttcatttactgactgtgtcagatgaacatcttggacccgttctgtgtgtgtgaatttgtgcttcattagaggtcgaagggcagtggtgatgctgagcaggagcaggcatggaagcaggaagggcttttgtgtctctttcaaatttgtaaaaattttcttttttggtggtggtggagaaacacttttaatcttcactgtgtgaggaattacaagaacaataaattaagccatatgttgaacctaaatttcctttgtacaaattattaaaatacaattgcatttcttttttaaaataatatttattttatgtatatgagtacactattgctgtcttcgtctgaagacaccagaggagtgcattagatccaattacagatggttgtgagccaccatgtggttgctgggaactgaactcatgacctttggaagagcagacagtgctcttaaccgctgagccatctctccagcctcacaattgcatttctaaaatgaaatcataggtatatagttgtagtcactaagtaaactaagttaaatgctgtacattaaagagaaacgtcaatgaggtaaacgtatgaatgaagacacttcttttttttttaggtatgttttctaatatttatttatttattatatgtaagtacactgtagctgtcttcagacactcctgaagagggcatcagatctcattatggatggttgtgagccaccatgtggttgctgggatttgaactcaggacctttggaagagcagtcggtggtcctaaccgctgagccatctcaccagcccatgaagacacttctgaactcccccatttcatcgagtatcaaaacccaccaatcttctagcctgaaaatgcctgacatgcagaaatttttttaaagatttatttcatgtatgtgagtacactgtagctgccttcagacacaccagaagaaggcatcagatcccattacagatgtttgtgagccaccatgtggtcgctgcgaattgaactcaggacttttggaagaacagtcagtgcccttaaccgctgagccatctctccagcccgtaaaaaattttcttgtgtgtatgtgtggtttacctgcatttgtgtttctgtaccatgtgtgtgcaatattcttagacgccagaagtggatgttggatcacccaggactagagctacagatggttgtgagccgctgtgtggatgctggggacccaacacaggtttctgcatctttggaagagcatccagtgctctcaactgttgagccatcgctccgggccctattttttctttctgagtcaaagtctcactaaggagctcaggctggccttgaacccattcttggcctcacaaagttccagatggcctgggactttggatcgcccacttttctgactctgacgagctggatgggattccaggcatctgctacggtgcctgccttagactgtcttacctgaggcttgtggagggattggaaactgatccccaaagctgtcattcctcacagtggaaggcaagcaggccctctttgtggccacagcagaggaggttcattgggtctgaggtcctgatgcagagcagagcgctttacctgtcaacccttggagtcccatcttagaacctgtaggtgttgactgggatgttgtggaggaagtctgtactctcttatctacccttgtgggaaactggaagggatgaccggggtaccagcccttctgtggtactgggccctgagttttcatgttagcttgggaggtcccactagtgatgttaggggaatttttccatcttaccttcctgctagagggaccttccagactggaggtgagggtgtgagagggaagtgtcccggctggtcaagaaagagaatgtgacagttgctatctgctcccccacccccacccccccatccttgtggtagagtcaagccacaccttagtcccactccgaagctaaggtatagggaaggtgaccccggaatgtagtagtaattcagatgtcggaaaagcgctacccaacagatctagcttagaagactgtggaacagttcagtaggagagcatttggttaatgtgctcaacggtctggtttcgtctgaagcaggaggattgtaaatgtaaggacagcttagggtgtatagtaagagtcaaaaaatgtcgagggctcggggtagggcatcagtgggatgcttgactagcaggtggaaaacctcaggtttggctgggcaagatgctcgctgctaagctggtaacctaaactcagttcttgggatccaactccccaaagttgctcttccgcctccgtgctccccatgctccttcagcgggatgtgtgcagctcctcccccaccaaacaagtcaaatggaatgtagtgtttttttttttttttttaatttgtggtggtatacactttttgttttgttttccgagacagggtttctctgtatagcccctggctgtcctgcctctgtctctcccaagtgcatgcaccatcactgcccagctggtggtgtacacttttaatcctagcacttagtgggcagaggcaggtagatctctatgaggttgaggctgctgcgtttctgtatgtagctccaggctagccaagggccttggaatgagaccttgtctcagagtcaaacaacagaacaaaactcggcctagaaagaaagcctagctggtaagagcatttactgctctggctaagcgcccaggtttagttcctaacacacaccagttgggcagctcacgctgtttgtaattcctgccccaggagctccacatcctcttctgacctgtgcaggcaccaagcacacccgaaccacacatgcatacacatacatacatgcactcatgccaacacatatacattcacacatataacactacaaaaatatttttaaaaataatatattaaaaaaaaccctctatactaccttctcactaccccctctaaaactttatattgttttgacttgctgtaatagtatatcattttttgtttgtttgttgttgtttttcgagacagagtttctctgtgtagccctggctgtcctggaactcactttgtagacaaggctggcctcgaactcaaaaatccacctgcccctgcctcccaagtgctgggattaaaggcgtgcgccaccaccgcccggcataatagtatatcttatataacataatagtatatcttatataacataatagtatatcttactatataacagatggagaaaggtcagagatggagaattttccttgcatgtgtaaggcaccctgagtttccgtccctaagactggggaaaaaagtaacatgataaatgatagatggagttattcatagttggcattattcaagtattgaaaaatcacacttaacagggcgtctcaattcagatcagccacacctcggtgtagcccgccacctggggtcaatggatactgattgagagtgtatctttccagtcagcctgcttgactctaagttactctcctgccacctaataatagcagtgggtcccaggaaggtttttctagggcaggttatttagctgtatggcatgcctcagtttcccctctgcagaatgaagataaaaaaaaatgctcatagaaaccctatattcagtggctcaaacctgtaatcccagcattccggaggggggctgagtcaggagaatttcagagttcaagatagccagagctgcatgagagcctatctcagccaaagaaaggaagaaaaaagttaatagcagtttcatagttgaagtgaagattaaacgagttagtgtataaagtgttttggttcttgctgggttccacctaagcactgtgtaagtgcttgtcaaataaatgacttatggatggtccttaaaaaaaaaaaaaaaaaaaaactcaacaatttggaaattttaaggtgatatgcttggaaaagtcaaatagtggaaggcctggggaggccgggtctgacccccaccatggtctgctctgtgaaactgatttatgacagctctgaggtacaatagaaggtctagtccctggcctgatgataagtgctccacagagactgactgaataatgacaatcttcaagatgaagaaagagtaattaaggtccaatgactcattgtgatggggctgggaggagccaaggaaggcttcctggaggaggtaggggagaggctttgtgaatgggtcagctgtgacagtggaagcaggagatggggacacaggtagaggaaaaaacatctttgtagactgaggactattaccatgcagtgaccactgtggcagggcttatcaaagggggagatctgtgctgcacacatcaggtaggatggaggtgtgtgtgtgtgtgtgtgtgtgtgtgtgtgtgtgtgtgtgtgtgtgtttgctggaggcaggcagattaccactgagctctgcccagggctactttaagtttacatacaccaaaacatgctcttgatggtgtgctgtttactggtttggacaaaggcatggagttgtaagggcacatcacaattaaggtacaagacagttccaggtccctgtatctcttcatttacagccacctcccctcccccacgtttgtatcttggcagcaccaatctggtctctctctaggcctgcagttattttgccttttcaagaaagtcatgcaaaccaaaccatacagttgtatagctttctgggtcaggcctctctaactcgccatgcctttgatagctatccaaaccgttccgattgttcaccttcaccttgtaccgtcttagtcctgagtagtctccattgctgtaaatggatgaaccacagacagtgtctctagtcatcttaggttttccagctagttgtgaataaagctactattagcatgttttttcctgtttttttttttttttttgtgtgtgtgtgtgagcacaggctttttatttttcttgcataaatacttaggaatgggatggctgggtcttttgtaacagctatgtcgaatatcttgtcgctgctacatgaggccagggagctggttgagagcactggctgcttttcccaaagggtctttgttcagttcccagcacccgttcctgggatttggcgcacctcttctggcctccatggtgaccaggcacacagtgcttgtggaattcacatctccatgcagagacagacgctcatacactgtatttgaacctgccaccctggtttccaggatgcactgttttgcgattctacttagcaacacgtgagtgtgttccacgttcagcctcccagcagggtgttgctgctatttatttgttctatgtgtatgctgtaccacttgtgtgtctgctgcccacgggggccagaagttgcataagatcctgggttgggcagtagttgcgcagagagagaggcaggtaacctggcttacagggcaagttctaggacagctagggctacacaaagaaaaccttgccacaacagcagcagcagcaacagcaacaacaacaacaacaaaacagacagaaaaaaatcctttgggaattgcagttaaaggtggttgtgagccacctcatgggtgctaggaacaggagctgggtccctgtaagaagagccagtgctcttaactgctgagctgtctttccagccatgttttatattttctaatggttaatgatgttgaacatctcatttgattataactcatttgcgtataactatagtgaagggtctgtctgatctttttaagatttatttatttatttttgtgtgtctccgtctgtgtaccatacgtgtgcttggtgccccctaggaggtgggaagccgccatgtgggtgctgtggatggaacctgggtggtctatagagaagaggtagaacagtgctacccctccccctcccccatcgtcaaccccaccatcacccgtgaacgactgctcctggcttagcacccgctgtagaacccacttcagaggaagaggctcaggttccggtgggcatcctctctggctggccagtgttaggtacctggtctttcatgcatggtgggtcaggcaaatctatctccacccagaaaaaaacaaagctattgccccagcctgcacctcagccatttacatggccttatttccaaatggaatgaccatttgttctggaatgggaggtggggtgcttggcaggccttcaggggtgctgggggtgtggctgagactcagtgggactcagtggggtgagttttctgggtcagggtggctcctctgatttggtaaccttggtccagtgtctctgtcttcttccccatctcttggctctcagacatttctatggtaaacgagccaaggctagatggatgctgcctcctatctttttttggagctgggccttcgtgtgtactggggggcatggctctgtcatggtagagtgttccttctccatgaaggtcttgaacttagtgagggaccgagctccagctactggtttgtgcttcacctcagatcctggatggataagggtagccccgagtgcctgggggagtaactgagggctagcccaacctaaggctggggagtaaaccttagtgtgtgcagcatctgccccaggggatgcatgatgggagtccgttctcttctaccatgtgggtcctggagattgaaagcttggctgcaggtacctttacctactggaccatctttctggccctaaatagacttttttcccccctttcactatggagctgtggttggcttggaacttggtcagtagaccaggctggcttcaaactcacagagattcaagcttgcagattgactctgtctcctgcaccaaacccagtaactaggtttaaaaaataacagtttgggggccggagagatggctcagtggttaaaagctaaaggcctgcgttgcttttgcagaggatcttagttcacttcccagcacccgtgtcccagctctgtgtcccagctcaggatctcaactcgagcgctgggggatctgacaccctctgacacgcacgtgcacgtagccaccaggcacagacatctgtgcatacacataatcaaagtaacaaaggaaaccttaaatatgtttccatttggagtttatagacaatggaggagaaagtagagaggccccagatttatgcctcttcccccagtttttctgattgctaatatctcaagtcagtgtggtgcccatgggatagctgagctggtgttagcaggcagacagcttgcagaaaggcttactctggggctcagagcccgcataacggtatgtactcaccatggcagtaccaggcaggagaattccacagccctaaaagtccttttcatctttaccccaactccagataacctcatgcttcactttatccccttgagacagggtcttcctgaacctggtgatggggtagtggctagcaagccccagagatctgtccgtcctcccctcctcttccctcctgccctgggaggtgcaggtctgtgaaatctcaactcaagcatttgcccagcaagtattgtcacccacagagccgtgtctctgatctgagctggcgggcgtccttctcccacctctcttaggctgagcttgaaactacagtctctcaagactcttatcttcctcagtttctctgggtttgtgagccccccgtgttttgtcgtttctaggatggttgagaaggcagagactcatcttttcagactcttcccccatggcttgatagcaagtgccttttttcatatctgaatactattccacagtcttgaccttttctttttggagttcaaagaggcccagtgtaagctttctagaggttccagcagtctatggcaaacttgagtctaattctcccccgcccccccccctccagcccgtttccaggggtgtaaaagcgtgtttcctcatggccttgttgcccactgtgaggccccagactgagggtggaggggtgtggaagccagttgctgtgacccacttcctggaggtattagggacaggtcggcagacacccacagctcagctgtttggaaaggctagcttgggtctggctccgaagtttccgaagaacagaggctggggtgctgatatgagtagggtgtcctccgcagccacgctcaggctgagcttgagccctgtggtctcttaagactcttatctccctccatttctctgggtctgggagcttcccttcccacctctcccacgtgaggctccgcccgggtttcctttccccaagtgcttccccgcccacttacggctctgcctttcattcctcctgattcacacacagcctccccctcctccgcccctccctgcaacgctgctgtaactccaaggcagtaccctggtactcacggccaggctctgatggattcacattgtttatgtattggtttgttggttttagagacctggggttcatctggagccttgcctgagtagctcagaactacctaccaacaggccaggacacccgaaccctcaccactagcggcatggttatattttggatgagtttacagattggtcttgaatttggggctctcttcctgcctcagtccccagaattctgggattacaggcattaattcaccatacctggctacaatttttgttgctaaggttcaaactctgtctggctcattgcatgcaagtggacactcaaggagctgagcagccacatagctgataagagctaagttggaactctggaagcgtcttttaagtaaactagattctaatcgaaatcagaatgaaggcccagttagtggtgattgtaggcactgggacacctaggtttggcttgatcccatctgtgcattgctgggatggagacaggagatctgtgaaaggcaggtgctagttcactgagccaaacccttcccaagtcatagcacacacacacacacacacacacacacacacacacagaggcacacacatagattcacacacagagagacacagagagagagacacacacagagacacacagacacacacatagagacacacacacgtacagacacatacaccctcacagacacacccagacacacaccctccacagacacacacagacaaatacagacacaccacacccccaccaaacacccctacagacacctacatacacacacacagacacacagacaccccctcccacagatacacacacacagacactcccccagatacacacaaatacacacacacacaccatacacatgcatacacacacacatacacacaccacacacacacacacacacacacacacacacacacacacacacacacacagtagaaggcctctttcccatctccagcaagccggcctcatctttagaaagtcactctggggtcagtttttctggctgagtaagtgggcctgtgcccagggccggccccttcgcttgttttctttcccctgctcgttctccttcctctattctccaggaaccatccacccaccgctgacaggaaactttcttgtttggtcaacttcatttccaactacaaacaagccacctttctttgtcatctgtactttggggtcccctgaagtgccttctccgtcacatcgttttttcttcctgactcttttttttttcccctccttttttctcagggtcttactatgtagccctggctgactttgaatctgctatgtagatcaggctggtcttgaactcactggtatcctgcctttgcctcttggaattaaaggtgtgtcatctttcctggctttttaatgacttttaaatgccaaggaacagagataaggtggtagttgtctgtaacccagcacctgaggcaaaagcaccataggtccaaggactctgtgtgtgtgtgtgtgtgtgtgtgtgtctgtgtgtgtctgtgtctgtgtgtgtgtgtctgtgtgtctgtagagcaagcccacacctcaaacccaacagataaacagttcttatggtaaaatactacaggccaggcctggtggtgcagatttgcaatccagaggctgaggcaggaggattacaaattcagggcctgtctgggctttacaatatatttgagggcagcaagagcccatctcacaaggtaagaagaggattggtaatgagcttaatgtagaacgctggcccagcatgtgtgtgaggctctgtcttcaatccctaggacctcaagtagtcaatcaaatatacacatggaaaaataccctcgtagcgtgttttggtttttcttcccttccttctgcctccccctcccctctctccttttttgataagttgaaattagccgggcagtgaatgtacactgtagctgtcttcagacactccagaagagggagtcagatctcattatggatggttgtgagccaccatgtgtttgctgggatttgaactcaggacctagggaagagcagtcagtgttcttaaccactgagctatcactccagtccatgttgtataatctaagatagactatagcttgcaacatagctcaggctggccaagaactcttcaggactggctgccttggtttattttggggggcccggtttgagagagaatctcactacatagacaaaggtgccttgaactcactgagctctgcctcctgagtgctgggttaaaggtgtgtgggatcacaggtgtgcactaccacttgactctacgtgggggtagctccggctgagtttcacaggctggcccgcaacttgcaatccccttgcttcagtcccccgaacactgggcttgcgaacatgtgctactatgcccagcttttcatcgtaatacgtaatttttagtttatgtgtattttgcctgcatgtatgtctgtgcaccatgtgtgtgcagtgcctcctggatgctggaagatgtcagatgctctggagctggtgttagagatggctgtgcaccgccatgtggatgctgggaaccaaacctgggtcctctgcaagagtagcagccgctcttgaccactgagccactacttcagctcctctgcaaggctgactcctttacatctgcagttttgtgcttaaacacctatcactatcaccgtcacccgttcccttaacgttttatccttgcctacagaatctctactgaaaaagaaaagtttttctctctcctcccagcttctggtaactactattctcctttctagctctgaatttgactgttgtaagtacttcttgtaaaagtggccaaagatggaggatattgtgtctggcgtcttctggctcattccactttgtagaatctgttccgtgttcacccatgttgaggcatgtatcagttattattgtttttttctgattggatactattccatcgagtggttataccatatcttgttttttcattggttgagggacacctgggctgttttcacctttggagaattctggaatcttcctgccggaagctcacctcgcacactggctgtggtactctgagccttgagctcagcatcacccacccctccacagtcctttacctatgttattctcagtaggcacaatttctttgtttgttctttgagacaatgtctcacgacttggtccaggctggatgtagactcagtgtctttcttccttaaagagtcctgggattataggcttgtactgtcacacccagctgacccactggtgtttttcatggtaattatgtcctataaaggcaccgagttaacaaatcctgaatcattactcataggagaaacactgggttgcattcatgcaagcctctggtcacaagatttttgtcagccaattaacttacaggcttgttttgtgggtgcttcagttccaagacaccttgcttaatgtacagtgctgattcactgaccctgggcccagagcagaactcatggctgctggaagcctggctagggcacgtgttttctccctcaggcgcattccagcctctggtgcttaggaacagacagttctttgcttggggctgttcaatttgcttttgtaaggatctgtagtgtctgagcaagcgctgagggttaattggtgtgatgctgtgcttggcagcttagccatgaagagttaagtaaatggagacagtgaagcaaaataagcttggagaagataaaatgcatatgtgtgcatactacacacacacacacacacacacacacacacacacacacacacacacacacacgtttattcttttgtttttttttttttcattgatttggagactatatcccttgccagcttgaaacttgacaatgtcaaccaagttgacctccatcttgtgacccttctccctttgttcctaagtgctggagttcccagtgtgtacccctgtgcctggtggcagagtgtaaatatgttttgtgttttacagagagtattttctctctgtgtatatataatagcttttactgtcttaattcacagcttgcttgttcctacataagtaatgacttcttgcaaataacatgccttttttttctgtcaattaacaaatatcacatgcagtttgatttttttttccattcatacttgactgaaatattcagctaaaaaactaagaatgtgtgcgtgcctgtgtgatgtggagttcagaggacaacttgggggcagttaggttttctccctctaccacatgggccctggggttggactcaggtcattacaggcttggctgcaagcacttttacctgcggaggcatctcactggctgtgggtctactttgaacaatgaccctgtaggtcatacctgtaagtctggccttaaggaggctgaggcaagatttcataattcatgggcatagaatgagattatggaaggatgcatgtaggttatacaggacacacacgcttcagaaagtttgagttcctctgcctgaaaccgtgccctggtggtcaccagaacccatagatgctcaggtcccttctgtaaacactccctggtgatgttggagatcacagatattcctgatgactgtgatttagagaactgattgtacttgatcttatggatgactttgggccctccttccaccttgtacacatttgatagaaggacattgcaggcagggccaggtctcacgtggctttgtcaccagtgcctggcatgtagcgcttgctcataccacttattcttctgtatttactttttgagacagggtctcccatagccttgatctccagtgtagcccaggatgaccttgaattccggattctcctgccttagtgcccctcccttgtgcaattctgaataaatcatggaaaaggatgggcgtggcagctatgaagagggagatttctctggctctccctggctggggcccactcctttccttcttgaaagtatcgcttcttgttactgggagacatccaggctgtattcacaatgaatcagaatgcccagggctcagatgtcccagtcccagcctcaacagttctggggccattgatggccacttccctttctagggtttcaatctccttacctaattcagacatctccaggtcccctctgcaggtctgtttctctctgacacaaaccttagggagtagcagacgcctctgctgacgtcaacgggggcggggcgggggcggggacacgggaccactgctcccatcttaaagggaataagagatcgtttatagccattatgagtgaccgtggcccaggaacacagatttaggttaccccaaaattccatgttccagtgtagaagcagttttacagattattgagagtttcacaggacaaagaaagtcataaggcaagtttggaatgcatcagtgggtacatcacaggtgcagaatcagtggggttggggatctagtctataggcctgagatgctatgtggtgacactcttagcaacgctgagaggtgctagtgcctgttaatagtgtctaagaggttttcagtccttgggaggcagaggcaggcagatctctgagtctgaggccagcctggtctacagattgagtcccaagatggccgggactacacagaagaaaccctatctttaaaagccaggaaaaaaaaaaaaaagaaagaaagaaagaaaagaagagaaaagaaaagaaaagaaaaaaaaagggttctatttattagcacatggtattggttcagtacagaatggggtaaggaatggctgttctaaaaagttaaaactaggccaaaataagggtattagtgtctgaacctacaaaattccgatctccccactaatacagtttcaatcggtccacccgtctctgcagaaactcattccaggagttttctgtttccagacagacacagctgcttttcaggaatttcattcacagtgaaaaaaaaactaggaaagctcactgcacagagagaccgcctggctcctcagcgggctaccctccttacctctgatttatatccttcctgctgtggtcagtcagatcgagttccctgctggtgacttgctgtgaggaagagcctctgagcctgcactggctagctgtgggggcactgcaccatgaggtgtctcagtttctccatctgtgaaatgtgctgggcctaaccagctcagaggggtatctggagtgagggaagacatagcctaatgactagtccagagcttgacactttaaggtcatttattctcagggtagaacgtgttcctcagtgtgcaaggcaccttctgcagacacctagttctgtaggcttctctaccctgtgtgtgcatgtatcaggaacaggatcatgggaggaggctgggaaggtggtcactctaacccagcgctgcggtcctctcatcagactgcctcctccccctctactcctgggttgttgctgagcattgaagacaaggtggtgggcagaggcagcatctgccaaagccaagggacaccatccagctttgtgctagtgtgtgctgcagctggaggcatgctgagcttgtgtatcaccctgtgactcctacctacttccaccttagcatgacttcggggcagaatagctataaggtgtgttgcttgagaagggaagtatcctgaatgattcatcagggattccggaagagaagggaggggaggggaggagattgtctcttccttttcctcctttgtgaaagtggaggatcaatcctagagccttgtgcctgcctacatggtaccagacaggtatacaaccagcctggtgtttctctctgtctcttttttttttccagatttttttttctttctagattgggtagcctgcccttgaacctcctacttcagctttcttattgtcagggttaccaacctgcatcactatgctggctcatttttatgtttttgagacaggtctctctctatctgtggctggcttggaactcactatgtagccccaggctgcctctgaacttgtgatcttcctgcttctgcctggtgagtgctggaatttcaggtcataatgcattgcctaacttgttttttcccctttcctttcctttccttccttccttccttccttccttccttccttccttccttccttccttcctccctccttccctttctttctctttctttttgttgttatttgtttttaagacagagtttctctgtgtagcactggttgtcctagaacttgctctatagatcagactggctttgaactcatagagatcagtctgcctctgcctcccaagtgctattgaaggcatgcaccacctctatctggccattttttaaaaatatatgtttaaaaatatatagttgtattttatgttcattgttgtttttcctgcatgtatgaaggtgtcagaaaccctgaaactgtacttatagacaggtgtgagctaccatgtggttgctgggaattgagcacaggtcctctggaagagcagccagtattctcaacttctgagctatctctccagccccttcattctttctttttggagataaggtcagaatagtgaaggctcaaagtctcttccctgccttccttgaatgtttccagggctatcttgtactcttgcttcagttattgtataactctagatagcaacgagactatggtatagcgagcgtctgatctggtaggactagccagggctcgctagtagtcaggagccattgtactagatggagccaggcctcagtagtgtctctctgaccaaagctagactagatcagggcagagtatctggggtttagatttgttatttctcgtcctactcagcaagccatgcagggagctctgccagcccaggggatgattcctgggccggggtagtttttaccccaacctgtccccattgtgaacttctgcagctgttctgttgtgtcccatgtccttaagttagggtggtatcagagtccacaggcagtgagggtggtggtgaggctggacctttgtcctacacctccaaatctctgagagtcagtggctggagaggaggccagcgggaaccacgtctttctttgtgcgccactctttccccatttctgttctttcctcatttctgtgtaatccagggatatcttgtaaacattctgagtttcaatttccatcacatcctgtttggattggagactgtgggggttggttatagatcacatattgacatcccatgagttaatgagcacagacagtccccagggtacaaaggtcaacatgtgacttttctgctttacaatggtgtggaagtgatacactttcagtagaaattgttctttgaaacttgagttttgctgttttcctggctggtaagaaacagtatgtttctgccatgtgggacagcagctgtgagccgtagtgtctagccagccacacagccatactgttgccaacatcccttagatgtgggtattgaatatatttcaggagatatacaaaacggtagtgtaaaagtatgcaggcagggtgtagtattgcatgcctttaatgccctcactagggcatcagaggcaggaagcactctatgaggtcgaggccagcctggtttatatagagagttctaggctagttaggcggttcagagttacgtagtgcaaccctatctcaaaaaagaaaacgacaacaaaaccagttttatattactgctctaacataaacacaaaaaacaactcccactgtggagctggggagctggctcagcagttaagagcactggctactcttgcaagaggacctgggttcggttcccagcacccacatggcaggcagcacatagccctctattactctagttctggggatttaacatcctcttctgaccttccgcaggcacggagcacacaggggcacatacatatgtgcagacctaacacccatacacataaaatctgaaactgtgtagaaatggaaattaacattgctttgagagtccatgttacccccgataagaatggggtgacatggacatatcatcaaaaactcagatgactccagatgatggtctcaagctcacaatcctcctgcctcagccgccagaattctgagataccggcacatgtcaccattcccttctacattagggtattattaactgactagtaagtttaccagaatatcctattgtgtgtgggagaacgcacacaaaaataacagtgttatttttcctggcctaaagaaagggaacctttggcagagtcggctcattaacagtaatgctgactgcctaagttccggctactgagccaggagcagggcagactctgatgtctgagcgataaccgtgttctctggtcaggggacaggcaagcacagtgaaatcccagcccacagcctgtcacaccagcaccttatactgactgtgtgttgtgtctggggatgtgtactgactgtgtgccgtggctggggaagtatgggaggagagactacaaggtggggttgaacagtccctgtggtcttgtgggagattgaccagcatggagggtccaagagcttggctggcaaatactctatcacagagctacaacagtagcagtctagcccctagcagacttctggcttgctgccttgctgtcccaatcaaactgtcctcagtaccaccaccgtgctgctctggggcagtgcctctgtgtatgacctcaggggcagtgtctccgtgtatgacccgaggatcctcattcttttctgttcctagaaaagtacttagaaaaggatccttaaacaatcccaattcctggttcttctgaaattcctccatagcccgcacctgtgggccttggggtggagtggcgtggtctttgggcctggttgtcccaagtaggacatctgttggcttttgggtggggcagagacagagctggaagcctctgcccagagcccaagagccaattggagaattatttttatttctctggccatagcacatggtctgggtggtgctgccatctgtctcccaccctacctctctcctggctggcggtccctggagggtcacttgagggaggagcaggggtaaagaatgtctctgggctggagttgacttaccccattcttctggccgcagggcaggctgtgtgggcagtttgcctaggaagagtgggagcggccagccagtcacaactggggagcaggagtaccacagccacacagccagggacagctcactgcagtaataaatcctatgttctagggccttgcgtgacccgctgccccactttccctgggacagacccaaccttgggaacatggagtgcaggtcctcagaagacctctcccgtggggctgtctgacacaactggtctctggttctctttaggcctcttcttctgggctgttttgggcccagcattggagtgtaggagaaggtaatgttgaggaggggtagggcccagaaactacctcctctggcagggcggggaggggcggggccggtggggtcacataagatagtatggggctcgctgcctctttgtcttgccctccatccagctcagagtgtgtggctgtgctctgtcaggccccagaagaaaatgaagcctagcagctaaactaatggggtcttatgcattagaaggttaattaattactgtcaagatattaatcatcattacctatgtgtacttgcctggcctgtttaaggtttcagaacttgtatgccaggcttggagcttcagaacaagggttattaaataccctgtacatagcacagactggaggcaagccctgtagtagactgcacgccaggcccccctcccccatgggtgtgtgttaggggagctcaaaacctagggccttgtgcttctagtgtaagaactctcactctgagttagctccgtagcccagtgtctgcgcattcaccgctgtgggagcaccctcctcctctgagtatttatagggtgcactgggaggcccatggagaaatatagggttcaggtggactgtgcgccacagacattgccagcacagaaggaaagaactcgggtctctgggtttcatgggccagagcaatgatgtagcttacaggaggtcactgttggctctagggaaggagccatcactggtcggtctcagttctcacacagaatggctctttctttctttctttctttctttctttctttctttctttctttctttctttctttctttctttctctctctctctctctctctctctctctctctctttctttctttctttctttctttcttcttctttaacctgaagccagaaggaaaaacagagccaaccaccatgagagagcttgagagtcacttcagctgtgagtgcagaatctgcttgttagaggtttgagaaacatcttgtggaaatttttaaaatcataatctcactgcatttgtgttgtttccccacacacacttacaaattaaacttcatttggtctcactgtgtagagtcagctggcctggaacacccttgtagatcaggctggtccttaactgacaaagccgcccacttctgcctccctggtgcctcaccactgcccgactttggggagtgttggaagtgttcagagccagcatccttgatcttaccggtaacttaaaggatatcgtctccattgttctagtaggtgtccaatttgtgtacgctctcaaaagatgtccttgctcaggttgaagaaatcagttttcttctctatcgcctttcattgtttatttatttgataacagtcattattgtgaagaggtcttaggtttgatcaagtggataacggggtgctttaccatgagccacggttgcgttagcttctgttcctgtgtactctccgtcctgccagagcctttgctcattctctgtggattatcttctcacgctagtttcctgtttgtatttttcacacacctccattattcctgtcttacatttctactgctgggtgggataaagatcatgaacaaagcaacttggagaagaaagggtttgtttcggcttacagttttggtttccccattgaaggaagtcagggcaggaactcaaggcaggagcttggatgcaggagctgtcccagaggccacaaagagggctatgtatcagattgctccacatggcttgctcagcctgctttcttattatacaccccaggatcacctgcccagggaaggcagcacccacagtggggtgggtgggtcttcccatgtcaatcattaatcaagaaaattgcctagagacttgcatgcacaccattctaatggactctctttgagttgagatcttgtcttcccagaggaccctagtttgtgtcaagttggcaaaaaactaagcagcacaattccctgttcttttctctctctcttttaaaaaaaacatttatcttactaattttatctttataactatgtgtagttgtgtgtgtctgtgtaggtgagtataggcatccccacgggtcagagatattggatcttctggagctggggttacgggtaatcgtgatcatctggtgtggggatgctgggaactgaactggggtcctctgaaagagcagtatgtgcttttatgtgtatgggtggtttgtctctgtatgtgtctgtacaccatctgagtacctagtgcctatagaggctgaaagaaggcatcagatcccctgaaactggattttacattgttgtgaactgccatgtctctgtgtgtgtgtgtgtgtgtgcgtgcgtgcgcgcgcgcgcgtgtgcgtgcacacacatgtgcaggtagacatgtgccgtgggacacgtggagatcagagaacacctttcgcctgtctctgcctcctatctcattgtatgagtgctgggagctcaggtgtttaccaaagcgtccagctttttagaggaccaaactcaggccatctggctcccgcattgcatgcttttacccacgtaaccatcttcctgtgctgagtcacagtctcttgatcctgactgtggcaaactggctcctgaatctcagggattctcctgtgtctttctctcattgacagtagaatctctgacattacagacatgggccacttcgttcaacacgtgtgtctagggatctagactcaggtcttcccagttacaaggcaagtgccttacccacagaccatctcccaactcttttgttggggtttgagttctgggtgagagctactttctccaacagtttggaaatatgttattttgagtctttttgtattactggtgaaatccactattaatttaatacttctttctggactcggggttggctcattggtacagcatcttcttggcatacaagaggtcctaggttctatgcccgtacagcaggctcttgctgtagataatccaccctttttctaatttgctctttttcatccctgatgcttttacggcatcagttttgggcattgttttattttatttgaatttatcctgattaagattcatatgggggctgtgagatggctcagcagataagagcaccgactgctcttctgaagggcctgaattcaaatcccagcaaccacatggtgactcacaaccacttgtaatgagatcttatgccatcttctggtgtgtctgaagatagctacagtgtacttatgtataataaataaatctttaaaaaaaaagattcattatggttccataatcggaggattccgatctttcatcccctgaggaagtttcctggccagttgcttcttcagctgttggctttgctttgtttgtctatgtcacccctttctggaatgatttcttgtgcccataggggttgaactgaaggctgtgtccctgctagacaggtttcctgtcagtgagcaacagcagcctgcatggcatcttcatctgtcaacagtgtatagggcccagacaggacttatatccactttattgcacatcaacctgatactctgtatccattagacaattccccatttctccctccccagcctctggcaatacctactgtgccttatttctaagaatctgcgttagcttctatatgtatacctatacatatgactggcttctttcaccacaatatcattgccaattgcccgtgttataacaaatggcagggcaacttcctccttagcgctaatattatacccatgccatattctgtattgattctgatgaatgcagggtggcctccagtttttggctgttgtgaatagtgctgctttgaacattggtatacatatgtctcttggaactctttctttcaattcttttgaatatatatatatatatttttttttcacctcccccgtaatatttaggatccttttcgcccagagttcattaatgtccgattgaatctatctctttgcctttgttttctacttcctagccttgtgtgtgttcttagaggtacagtcagggagtgtttgtttgttttcgagacggggtttttctgtgtaggcctgggtgaccgggaactagctctgtagaccaggctggcctcccactcatggagatctgcttgcctctgcctcccgagtgctgggattaaaggctcactcagaggggtcttttatgctcattgggcagtttagaagcttggtttgctgaggtaaaacaacctgttcaagcctccctgactcctgacccccacccccacccccacccccagacctttcactttgttccctgagtaactggcctgtactacttgggcatcctgcagtgtgcaccattcttactgtgccttgttttggctctaacaggtccaacgggcgctcctccaagccgagccttggagggcaaggccggcaccattacctccaacgagtggagctctcccgactcccccgaggggagcagcatctctgggggcagccaggcactggacaagcccatcgacaatgatgcagagggtgtatggagccccgaaattgagcgaagcttccaggaggccctggccatctacccaccctgcggccgccgcaaaattatcctgacggaggaaggcaagatgtatggtaaggagcctgtctgagctgggcggaagctggccttgtagttcagcaggagtggacacagtaaccttggggctctcccaaatggcctcttgtggcttcaactgagtgcacagtgctttcttctgtcctgagttctgagcatctgagaaaccaatgggtgatgagcatggggtctggtgaggagactgtgtactagtagaaaaaaaatgtctgttcagagacagggtttctctatgtagccctggctatcctggaactcactctatagaccagactggcctggaactcagagatccacctgcctctgtctcccaagtgctggggttaaaggtgtgtgccaccactgcctggcaatagagaattttatgaggattatcaggggtgtaatagactatctccacagagcagactaaaaattctttgtctctgtctgtctgtctgtctgtctgtctttgcctctctctcatgctcttgcacatgcatgcacacacatgcacactccatcataagcaaatgcttgatcttcatgccaccaaccttagatacaaagagtaacaaaactggggactttgcctgggtgtcgctcagtagtagagcatacttgcctagcattaaggaatgtcccgagtttaatccccagcagcaaatagaagggggggaaaaagaaaggaaaggaaaaaattgaagggattcttttggagtaggactcctcgtgctcccttctcctcctccctgctccctcctccctcctccctcctccctgctccctccatgtatccagcacatggcaaacagcagttggtgcagcaggtgtggttcgtgtcatggagtggggacatggacacacacagctgacagttctctcaggcaggctgtgagagctatgccttccttcagggaggacccccatacccttcagcttctcgagtgaccaggatgtggaacaccacatttagcaaccatatgggaaggaccagcaggctatatgagtgagtctatatggctttggaggagaggattctgggaaagttaaaacagaccaaaactgaatagctagagcaagacccaggtcagagttagatcaggcttctgcgcccactggaaacatcccacctcagggattcgtgcttcaaactgtatgttgaggggtggaaacccagaggtttgagaaggcctctgcaaccggtgacgttaggacagcagagggttcgaaggccagctgccactcttgctccaatggatttccactcatgagtgtctctccccactccccacagcacagtgctttttcagctgttagagagccactgtgtaggagatctgagtgtattagtggttgtcaccatagagtaacaagttctcacaagctgcttcaatgttgaaaacaacagcaacaagctggggtagcttggagggagagtatgacctcggcttgcatgaataggcatggaggtggcatgcagatagaagcaggcaaaggaaaaaacggaaaacctgtttatttttatgtgtatgtgtgtgtgcctgagtatacatctgcaccacatgcctggaaggtcagaaaggacatcagatcctctggaactggcattaccaagggttgtgagctgccacatagatgctggaaaccaaatccgggttctctgaaaaaacagtaaatgctctgagccatctctccagtctgcctcttaccttacaaagacactagtcactgggtttaggatatgttttagttcagtatgatctcagcctaactaaagcacccacaaagtccctgtttctaaactgggccgtgggttgggctgtggtacggttcagtggtggagtgttggcccagcatatgtaagttcccgatcccatctccggcatcacacattacagggtggcccgatgctgaagttacaggtataagcaagctctaggggcttcttagtcttcagcatccctcagctgacaaactgaagtccagtcccagggctgggggcaatagagctctgccagctcctggttttgttgttgttgatgatgttttgtttgctttctttctcttttttccatagtcttccccacaagaccaaaacagtgcctttcttttctttggttccttgctcctttcacgtcagaccccaagaccccagctctgctccctgacaccagttaagaactccccatctctctctgcacccctcagttcccagaggcacccccttaccatcccctgctctgatcacttccggttctaacagttgctcctccaggggaacttcctagaggagaaagctgacctatggaacatgcatagggtaccagctgggggcagagctctccatggggtatcctcccatagctgccccagatccacgggctctttggtggagagcagggtggatgccaataatgagatcaagtgtgaaggtgggaacgggcaggaggtatattgagaagcagggattaacaggaagccagagtgcgtgcacaggatactgagaaggaattactgtgtatggaagcagatgaagtacaggaatcactcagcagagggtagcggctgagggtactacagtgactgagaagggccccgaggtgaagccagactgtcttagagtttctactgctgctgtgaaacaccatgaccaaaagccagttgggaaggaaaaggtttagtccacttatgcttccacatcactcaagcaaggcaagaacttggaggcaggagctgatgcaaaggctgtagaggggtgctgctttctgccttgctccccaggacttgctcagcctgctttcttatagaatccagcccggggtgaccccagtgacaatggcctgtcaatcactgattaagaaaatggcttaatcactgattaaaaaaataggtttgcctgcctccagctctacctgaaagaggcattttctcaattgaggctcctcctctcagaggaccctagcttgtgttaagttggcataaaactagctggcacagtgacccatgccaggaaaattagaaagtttgaggccagcctaggctatacaagacactgtctgtaaacacagggtgggcaagatgcagggaggatggctcaaatctttcagcagacctgagttcagttcccagcatccgcatggagcaattcacaactgcctgtaagtctagtcccaggggatctgaagccctcttctggcctccacaggcaccattatacacgggacacacacatacacttagtaattgtcttagtcagggtttctattcctgcacaaacatcatgaccaagaaacaagttggggaggaaagggtttattcagcttacacttccatactgctgttcatcaccaaggaagtcaggactggaactcaagcaggtcaggaagcaggagctgatgcagaggccatggagggatgttccttactggcttgcttcacttggcttgctcagcctgctctcttatagaacccaagactaccagcccaagagattgtccaacccacaaggggcctttcccccttgatcactaattgagaaaatgccttaaagttggatctctctctctctctctctctctctctctctctctcttttgggtttttcaagacagggtttctctgtatagccctggctgtcctggaactcactttgtagaccaggctggcctcgaactcataaacccacctgtctttgcctcccgagtgctgggattaaaggagtgcaccaccacgcctggctgagttggatctcatggaggcatttcctcaactgaagctcctttctctgtgacaactccggctgtgtcaagttgacacaaaactagccagtacagtaataataataataataataataataataataataataataaatgggcagggagattgtttagtaggtaaaaacatttgctgccacaagtctggggacctgagattgattgatccctgaaattcaggttaaaaagtcagatggagaggctggagagatgactcagttgttaagagcacaaggctgctcttgcagaggaccctggttcagttcccagcacctacatactggcttaaaaccatcctcagctccagttccaggagatccagcacctcttttggccccagtgggcaccaggcacatgctatgtacttccatctttgtagatcaaacactcatacacatgcagtaaaaataaaacaaatcttttaacaagatagatagatgagctcttctagggcaagatgggaaggtcattcaaaagcagaaatgagagaccccctccttaaacgcaaggtgggaggcagctccaactcccaaaagtcattggctgatgtcattgtctgatgtctactggatgcacatgtggtatgcatgtggtttctctccatctaccccaccccgaggcctgaccctgcttatgtacacgtggtcggtctctctctctctctctctctctctttccctccctccctccctctcacatacacacacacatcttttttttcaaggtaattaagcaaaaaatgaataaaaacacaataaagattggctcagtggtccaggatctttggctacctgctttagattgagtgacattcttgtgactcacactcttgttataaccattgcacccttcccctgcagaaatgttgtgacctccaagtagaactttgtaccccttaagcagcagttctttattccctccctccctctctcttcctttctctctctttctgacaggatctcgtatgtcatcctggttggcttggaaatcattgtgtaggtcaggctagcttagagctcacagggatctaagagcctttgccccctgagtgatgggggtaacgtgtatcaccatgcccagctcctcaggcagctgatgcctgtctttctcagtggatctaaccattccagtcccacagtgggataacgtatttgatttagccctcttcctcttcctcttcctcttcctctttgtcttcgtcttcctcttcgtcttctcttcctccttttcctccttccatttccttcctcttcctcttcctcttcttctaatccactcagtgtcatgttcatgttgtagtgtgtgtcagaatttccttccattgtatgtctgtattggacatccatcagtggatacttgggctgctgcttagatttatttagtgattgtgggtagctatttcttcccctaatttctttacatgtaaaggaatggacattagtctctcaggtagtgagaagagcagggctagaagcctccatccccacctactttgaactccttaactgtccttcctggtcctgcctccgcctggccttgggtcaggtgggtcagtcctgggcagggggacaagagcgtcctgctctatctgatgactcacctggccttcatgaagggaggtcctgcagtgagccagacactggcttatactagtctctttaccagcttggtggccagcacagctgggagctatagataaccctgagctcacagcagtgtgtgtggggctggtccccagggatactgactcagacctcttgccctggctgtgctcctctgggcctctcatcttccctgaggaacctgttgtaccctatcctcacctctagtcagtttcagctgccagcacccccaagagccctgtctttacacttcctgcatgcagagatcatttcccaagtggaccagtcagtgggcccacagtcagctgacagcagatcctagagttggggccatggccttagtgttttgactacagggattaggcctgttaccagctcaggccaccgtacaccagagccaggcagccatgcggatgacatgcagagccgcagcacagcttaacacctgttatttctgagccgaggcacccatgcttgttggctttggtctccaaactgaacgcctctcgtttctccagtacgagctctcatgcctggggtgccaacctcctgctcatggctccgttcacttttgccctttcactgtgtgactctcagtctgtaattgagcattctattctgacatcctattctgatttcctttggctagcctggcctcaggtccctgggaatggaggtagggaggaaagaggtacttcttcactcttgcctgcatctgtcctttcccctcttcctccccttagcagctgcattgagggatgccttcctcctcctcttcttcctcctccttttcctccctgaggctggctccttaatcttttgcatctgttcttcctggtcccagccttcacctaccatacctggaggcagctcttgtatggctgagtctttctgcccctggtttcattccccgtgtctttgattcctctgctatgcccctggcttgccattaggctagtcttatgaagcatcatctctccttgaatctagctggagtaggggttggggaatttctgttcttcgtgactccatggctagtgagagaggcaggagaaataccttttgtaagggaaccacccagacaggcatgtagtagggtggagccaggaaaccagagggctgggttgtcttggacctttctggaaggaagagggtccccatctggtggtggtggtgggacaaatgtgctctagacaaaggagctagagtctggcactgtctcataggtaggacttgacaccgtagctttgagagcccagtaaagcatctagacaaagcattaccaggaaaaggttagaaatgagcaacacactattaaaagctcccttttcagcctagacttgggcagcctaagctggagtcttgttgaatttttttttttttttcttttactgtggggatggagtaaaaagtgggagactggcctgagtttcctcctctgtctgccccacctcccccatattaattgttccttactggttctgacttcctttggctagcctggccttggcattgctcctaggtgtcctagagtgttttccgttgctgaggtaaaacaacttaggaaagggtttatttgacttccaggtcacagtccactatcaagggaagccacaccaaggcagaaggaacctgaaggcaggcactgaagcagacatcatgggaaaatgctgcttactgccttgttcctcatggttttctcagcctgcttctttttttctttttcttttttggtttggttttgttctgtctgtttattttggggggagtggggtggaagagacaggtcttactttttgacaccgactgtcctagaactcactatgtagaccagactggcctccaaccctcagagatccacctgcctctgcagcagactcatcctgcttttttatataccatgagtgatggtgttgcccccagcacaggccagtatgatgaagtatttctttttcagttgtggctccattttcccaggtgacccttgttgtgtcaggctgacaggtgcttgggtgtttgcttgttgcttctttgtgttttgtgtttccagctcttacactgttctcgtaggctgtcacctctctcctgcttctggaggcccatggaagcccaagtctcttccactcacgctaccttgatggcagatgagatctagagcaagacttaaccttgctgaacattgcttttcttctctgtaggatattcatgactacctttgagaaaggtgttttgatttcttttatttcatggtaggatacagatgctaagctgtttttttgtttgtttgttgttctttgtttgtttgtttttattttgagacagggtttctctgtgttcccctggatgtcctggaactcactttgtagaccaggctgtcctcgaactcagaaatctgcctgcctctgcctcccaagtgctgggattaaaggtgtgtgccaccactgcccggctgtttgtataaacagtgttcggtggcattaaatatattcagttttccctttaaattttataatctttaagaagaatcattattttggagccgagtgtggtggtgcatgcctttaatcccagcactccggaggcagaggcagaggcaggcaggtttctgagttcgaggccatcctggtctacaaagtgagttccaggacagccagggctatacagagaaaccctgtctcgaaaaacaaaaacaaaaacaaaaaaacaaaccaaaacaacaaaaaaaaagcatcatgattttggggctcagtgggtaagagtgctttctatacacgcacaagaacctgagttcaaattccaagcatctatgtaaaaacccagaaaagcctgatgggcagagacaggaggatcattggagcttgccgccagcctatctccgtgttcattgagaaaccccgtctccagggagtaaggtagcgggtgacagagcaggacatctgatattcttgtctcgcctctgtgtgtggatgttcacaccacatgtacacacacattattattttaaatttactctattgatttgctttgtgcatgtgtgtgggtgctcatttgctgaggtatggtatatgaaggtcaaaggatagcttctgggagttggttctctcttcctaccacgtgggtcccggggatcagactcagttcatcaggctggaggcaggcatctgtctcaccagcccccaagttattattttatgctgaggatggaacgcagagtcttgtgtatgcttgccaaaccctctagcacaagccccaaccccagcctgatacattcacatcgttgtgcagccgctgttaccacccctttctagaactttccatcaccctcaaatggaaattgtacccatcaatcaataacttctcattcttttgggctcccatccatgagcacagcatctctctcacgttctgtctctgcggcttggcctgttctaggtgcctcagaaaagtagaattgtgcaaaggttacttcaatgtttgagagggttttgtttttatatggagggtagaagccagggctttgcccataggaaacacaggacctaccagtgagctacagcgcaggcccagacatctggcttaatagcccgtccatcatcagcaaatggacttttgtgttgtctgtgtccttgcagttttgacactgctggtgagcattagtgtgtcagggtctgagccctgctttgtaattcttatgggaatccaggagaggaaggaacggttggctctgatggtgattttatgtttaacatcaaaaacagtgtttagctgagcttggtggcacaagcctttagtccctgcactcagacagaggcaggtggatccctacctttgaggatggagatcagcctaatctacatatggatttctaggatagcttaagcctacataataagaactttttatcaaaacaaccaaccaaccaaccaaccaaccaaactacaatgtgtgctgttactctccttcttttcctgttgctgtgataaaagactctgtcagaagcacattagcaagagagagtttacttggctgaaagttcagagttacagtccactgtgcagggttgtgactgcaggaacttgagggagctggtgacatcatgttcactactagtaggtagacaatggtgaatttttaaataatagaaaaataaatttatttattctatttatatgtgtgtattttaatttttaatttttatttatttatttttttctgtactatgggcatgcttggtgcctcagaggcccgaagagggtattgggactcctgggactccagttctcggtggtcctgagccaacatgtagatgctggtgattgcatcttcattatctggaagagcaagtcatctctgggccagagaatgatgtttgttgagttttatcccccccacccccattcttttatatattctttatatattttttattctttatatatttttatattctttttccagacaggttttttgttttttgttttgttttggtatgtgtgtattcttgtctgtcctagatctcactctgtagatgaggttggtctctaattcagagatctgcctgcctctgcctcaggaatgctaggattaaaggggttggaggtggggtgggagtgtgtgtgtggctggggcttgggggtgggggctcatgtgtgtgtgtgtgtgtgtgtgtgtgtgtgtgtgtgtgtgtgtgcgcacgcgcgcatgtgtgtttgtgactggggtttgagggtgaggggtcatgcatgtgtatggggaggtgttcatgtcatggcactaacatggaagccagaggacagcttgcagctccaacaggttgctggttctctttctctactgtgtgagtcccaagaatggagcctagggtatcagtgtaggtagctacccttacccactatctcagatgctccaggatagatgaattctgtgcccagctctcctcctctcctcatccagctccaggaatggagctgcctccttttggagcctaacctgagtaattgctctcgggtgcgcctggtgccgcatctcctagtgattctagatcaacctgaccgcccgtcacaggttccagttcttccacacgcttgtgagccttgctatttccccttttctatttgtagccatccgagtaggtgtgagttagtgtcctgtgatagtgatgctcagtgatgctgaggtgcccggggtgatggacaccccctccctcacagttatgagaggtccaatgcagggaagacatagacctgagagcacaaggagactccatgtttagtggggactgtgacacagagctcaaccaaggaactagaaggctcaagccatcacctggggagtggaggtgggaacaggccacacccacacagtcagggagagctcttggggatgccagccaacagaaatttcaccttctggtcttggagcctgttcaggggtgatggtggtggcagctcagttaagtcccattgctctggtcacttctccacaagcaagctcctccccatagcccacagcatcagtggatcttggaccgagaggcgctcctgctatccaggttagagagcatagcttctccttcctggaccctgggtcataagagggattgataacagagtgtagagaaggggatgcctctggagagaggttcttagaccatttcagtttttaaagcccattgcatttattaacaaggccttgtaaatagcagggcctggcagtctgaggaagatggctgactgtcctggccttgggctaaacagcctgtcttttacttcctcaatgctgtttttatggcgtagcgggaaggctgatgtggcatggacactgctctgcctgttagctggtggctttgtgggaagcaaagaggtcatgagatgaccaagctgatttctcatcagagatccctaccctcagtcggtggccaggccgaggcactcccttctccttgggcagtccttcccatggtgggccacgtatctgagctatgtgtgttagctgttggacacatgttctctgacagatgggtctaccatctgtctggtagggatgtccttcccagcccctcccaggtcctctctagggtgggccaaggccacctgccacattgcaatctccagctgctcaggatctccccaaaggccagggtggcttcctgcttccttggcttctgagctcaattgctgaggggtgaggcctgccattatacagccagtggcaaggctgggatggcaacacatgtcttcttccttctctctgagttatctgggctttctatcctgtccccccttcttcccacctcttcccccctttttttctctcttttggtggaaggtatttttgagacataccgctatatagctcaggctagccttgaactcactctgtagttcaggcaggctcccaactaaaaatccccctgcctcagtgctcaggtggtgggtgtgccccaccactcctggggttcctgcaggtttcttcttgccaaggctccttgacaggctttggcatctctctcttcaggaccacattcctgcctgccccttactcttcctcatccatcaaatgttttcctgagctcaagatgccactgtctacaagggttgagactatggcgcatccttgggtggtcttgggggatggaggtcttatctgtgctgacactcaggagacctcgatgatccaccaaaagttggggaacagagtggatccttgcgaaggaaaatctactgcccctggggagaaggcttccacaagaaagaccagcctttgtgtcaccatggtgatgaatagtcaccatcctagaaaccaatcttaatagtgcccgggccactaacaagccatgtggccatgactgaagcgtttctccatcctgggcttcatttccttctttggcttagtctgtgggagcacctgcttctaggagacatgaccaggttcagtcacagttacaccatgtgtttgttaaatggcctccttgtgggcatggtggtacagatctttagtcctcccactcagaaggcagaggtgggtggatctctgtgagttcgagactaacctgtttatgtagactacgtacattgcattgtgaattccaggcctgccacattatacagcaaaatcctgtctcaaaataaacaaaacacacatcaacaaacaaacaacctaagacaaaggccacagaggaatcagcaacccttagctgtggaatttaaaatggcagctcacaggagagaagggagaatttggccagccaggaaatgtgaagatggtggcctgaggtttaaaggtgccattgtgcacctcaaaattgctgagggtttgttttttgtttttgtttgtttgttttttagatttttgaattactgtcttgtttgtttgcttatttgtttttcttcttttctttcctcctcttcctcctcctcccctttttttcaagactagctctgtagaccagggcaaccttgaactcacagcgatctgctaacctctgactcacaagtcctgggattaaagggtataccaccattgcccagttagggtcttgttttacagccctgactggcctggaaatttattatgtagtctagtctggtctttaaactcaaagtgatcctcctagctctctcttgagtgacataattacacacctggttgcatttaaaaaaatatttgggtggcaacatatttgtcatgccagcacttgggaggctgaggcagagaaggcagcggtggctttttgtactgagtgctcctcaggcttggggaagggtgtccgacagcttgtattgtggcctatcctgtaagaggcattgctgagcatcctcactgggtctggctcagtgccgaaagcaagtgacctgggcagtcatctctcctagatctgttgatggatgtttcgagtgagagtttttccagcttgttttgatatgtaacaaataggcagagtgacgtgactgttgttaggagagacgggcttactctgagtttacgagctgacactacaggagtcactgtttgcaggcgtacccaccaaacccctgaacttaattccttatagttcaggctggcctggctgtgtacctgaaggtgacttttcaaaggaagtttgaacttcaatttaaaaagagatttaattaattaattaatttatttatttacttgcattggtgttctgcctccatgtatatctatgtaaagatgtcagatcccctggaactaaaattacaggcgggtactgggatttggactctgtccctttgttaagcagttagtgctcttaaccacaaaaccatgtctccagcccctaatttatttatttattttttaaagtacatttattcatttgtgtggatatttgtggatgggtgtgggcatgccaccatgtgcatactgaggtcagaggacaaccccctcccaccatgtgggtcctgggaatcgaactcaggtcttcagtctttatagctagaacctttatctgctaattactctattgattggctggttggttggtaggtaggttgatgtgtgagtatatgctatgtttgattggttgggtggttggtcgatgtgtgtgtacatgctataacatgtatgtggaaatcagaggacaaggacagagttggttttctccttccacctttacaagggttccagtgatcgcactctggttgtgaggctgtggggcaaacactttacctgctcagccacctggagatcctggtaatcttgaatttctgatcgatcctatggcctccacctccaaagtgttacaactataggcgtgtacctgggttatgcagtgctgaggctcggggctgaactctgggcttcctgtatgattgtcaagtactttactccctaaccctccagggaggtttctgggtatctgatatagaccaataataaacaccccattctcagcgtgcacttctggggggaggggcagcgctcagagtatcaggagattacgtggtgctcggagcacactgagggtgacaatgagtgaggctgaggtgtgctggtggggatggagatcctcgccctcggatcacccaccgtcagggaatatgtcacaagaccatggcagccatctccacccaggccacaaggccattccagacacttccaggaacatgaaggtgaggttccctgcaagcacaaatcctattgggcaagaggacccagaacattccaggaagcagctcagagtggcaggtagatgacatccagagaggtggctgagctggatatgagggtggacaaaccctttgggtgcttcactggaaggacttgaacgtttcctctgtgtgtgtgtgtgtgtgtgtttcaggttccttgtgtatactaggtaagagctttactgctgtgcccagcactctgtacccttcccccaccccctcttgtattgcttaagctgaggaccagcccctggcagaaacaatcctcttgcctctcagcctcccaagttgctgaaactctgatactgctacgacatctggcagaccttggcctcttcatctgagaaagatgggaagccagggcagcaccttttggattttagtagagatgccagctgctgggctgagaatagtctgaagcaggaagccaggtggagcgattaataacccaggccagtatcagtctgtgagaggtctacatgctaatatagtacctagatgggcccgccttaggtgcccgatattgttggtctgcatttcttccttgccactgggatgctggaccgccggcatgtcactcagggaaggtgaaacacaggggcaacaggctgcatgtgtgccttgtcgctgggaactggagcactgtggaaatgttgctcaaggaagaagaacacagtctaggatagggggacagcaggaactgggacagatgttgtggttctcagtctcctgtgtacccacacactgccagcaactttgaggagttgagaatggttgtcctcacaggcccacgctgagcccttgacatgatgtaggtggaatctggcttagttccaagtatcaactatagggaggggctggatgcccaggaaaggaagctcattggctaaacactctgctggtctcttagcagagtgtcttggtcacatgtttcaggacaggtagtctgaggtagtctggctgggagctgattctaacacctaccattctcaataatgagatttaccggggttttcgaaactgctttgacctgccagcttttctgtttggtgacatggttggttccacttgccccacaggccacagcatggtagcttggaccacagaactgaggtggggagaaggggtctaattttgggaatattttgaaagcagaatggtgacagactcagtcattccttcatccatgtgttgattccattcatctggttccaaacactggcgatattaacttgttttgaaacatggtctcattatgtagcccaggctggcctgtaatttctgacactcctgctgtccgtttcccaagtactgggtcacaagcatggaccccgactgctaactttggaggtacagactggagtaagaacagactgaatcgtgtgcacattcttttcctctgggatactaagaacctaaacagatgcagataattgataagctgccaaggcaagaaagaaccagaggagcagcccaagaccgatttcccagacatccctaaggttcgcagcatcccctgctgggttggctagttttatgctaatttgtcacaagctagtcatcagtgaggagggagccccccttgagaaagtgtcttgttaagatggactgtaggcaagcctggagggcattttcttaattagtgattgatgtgaggcccagcctgttgtgggtaaggccacccctgggctggtcccaggttctataagaaagcaagctaagcaagccacgggagcagtccactaagcagcatccctcccaggtttctgctctgcttaacttcctgtcctgacttccttttatgatgaactgcgatgtggaagtgtaagccaaataaatcttttcctccccacattgctttggccatggtgtttcatcacggcaatagttaccctgactaagcctcctgccttccctttcaatccagctgtcccgccaccaacactcagactcgctctcgtgtctccagccttggattggcctgtggttctcagaaacttcttctctgtcattcctaacttattcctggcctttctctctgaattctgatagattctttaagctaagagtgtattctccttcccaagagactgactgagcagcaggcttctcatcctgtctttaaaaaaaaaaaaaaaaaaaaagaaggactgggtttaccctctagcccaggctggactcaaactagaagcagtcttccctgcttggactcctaagtgcctccataatagataaggaccgccatgcctggcctgagttctcacagaaccagtgttaagccgggcagtggtggcgcacgcctttaatcccagcacttgggaggcagaggcaggaggatttctgggttcgaggccagcctggtctacaaagtgagttccaggacagccagggctatacagagaaaccctgtctcgaaaaaaaaaaaaaaacaaaaaacaaaacaaaaacaaaacaaaaaacaaaaacaaaaacaaaacaacaacaacaaaaagcttagcatcctaagtcagtaaaaatgtgtgcgatcaaatatagaagaaagacgttagaagaactagatcgagctagattcgaaggcagagtggagatccacttccaccagctggctgtgctcccaaagctccttggtagaactggaagtccaagcccagctctctaaactctaatgttgtggtcgctttcccattaccaaccgctgaaggctcaggctttgtagctgcagcacagtcacctttagttagacacacagtaaaactgctgggcattcattgccctgccagcagcacctatggactatgtcctcctccaaagctttggaggagacatctttcaggactcatgtttttaggtgcagactgtctcacacagtacctgaggagcctggttcctccttttgccttcctccctcagacacagacaggccagcgcactcaaggccagcacatctttctgtcagttgaaggctcttaatttggacttggctgtggagaaaggtcagcttgggggccagcctggctctggccaagctctctagttacagcctagggctcgcctcacctgcccctgtaatagcagcttcctcacatggccactccagcctcagctgacagggcaggcctctgctatgccccctggcctacaagtcaagcacagaggtgacagcttcccctacctcagccctccctctccctctccctcatctgatgtttacacagaggttgacatcccacctgggcccacctgcttcccaaacctgaactccccccccccttctcaaacatatctgctccatgcggatatgtgtccctctaacctagatactgacttctgtttatcggacagagggaggaggatcaaggatggacacacggtctgagccagccagggctagatagcaattccttttttctcgaaaagcaaacacacacacatacagcaaaatatcaactatgaaacgtggctgaggatgtagcgtaggtaacagtgtttgcctagcatgtacagtgctaggcttggtctccagcactgaatcaggacctggcatggtggcacatgactattaatatagcccttgggatatggaagcaagaggatcaggagttcaaagtcactctcagctacgtaatgagttcagagtcggcctaggaactaataatagtaacaataattaaaaacccaatacatcctctttgatcttatttatagtaatagaagatgtggctggcttggggacatagtatggcctccaggtgatagtgaggcagagccttgagctacaaaagtagcctgggttttggttttggttttggctttggtgagattgagaatagaggccttttgcctgttaaacagatcttctagcacggagctatttctcctggctgccctaactggatgaagaggcaggcctcctccctggaaactattagagtcccaggaccacaccttctatcttccccattgcccaccaaccatctttaaggacctcctcatttccagaggcagcagaaactatgagagcctcacaggcaagggccaggtatttcccacacagaaagccctgggaaggaccaaggtgttgaagcagccactgtggaatgaggagtttgggctgagtggtagtggcccacgtgtcctgattccactactgtcaccagtctgtctggtaacgatgtagtctcttctcactaatgggatatccctgtgttccaaggcaggcagggggagcttacacagtccttactctaagtctccacccaaggtgggcagagtaagcagcccaccttcatgctttccccactgagaggttgtggtgtttctacaggtcggaatgagctgatcgcacgccatatcaagctcaggacagggaagacgcgcacaaggaagcaggtgagcctggagaggtctccccaaggggattggagaggcacccacttctctgggtgccctggttcttccatttaccagcgagtcaaactcccactctgggatactacgggaaaaataaatccgtcccccccaccccccccagcttatgaagtactgccagactcaaggtgaactgggcaggcaggagggagctccccacattgacctgctcctcacacagtacattcacagtgtagccagagagccatggagggctaagggttggggacacacaagctgtctgggaggtggagacaggaagtctctctttctgcaacaggtctccagccacatccaggtgcttgcccgtcgaaaagcccgggagatccaggccaaactcaaggtaaggaaaaccgtcagcagagagagaaccctgggacttgtggggtgaagtggggcttcccagaagtcaccgctctttttccagttaggaaagtcagcgctgtgggtccaggggcttccattgtgttgagcctgtgttgtgtgcttcttgctgttaaggacagttgaggcctagcctgtggcatctgccatgtgtgtgggtggcagtctcctgctgggccctacctgggatttagtgtagcagggccagactcagcatttctgtcccccgacccctgtgttctctgagatgagccacctcacctcatctcttccctcgacgggccacctcagaaagacagtcagtccttcaggactctggacccatgccctttgggtgagcactaagagagggtgagccttctaacagggagaccctccctcatccctcccccctccccaagggtttctctgtgtattcttggctttcttggaactcactctgtagaccaggctagccttgaactcacagagatccacctgtctctgcctcccgattgctgagattaaaggaatgcaacacagccacctctaatcccatcacctcctatctgactggggcccagattcaaatccgtagaaccacggacctctctgcctcctgagaagctacactcattgtcctcacgcttccgttcctatcctctgcccagctgtctgacataccccagagctgtggctcagcacctccatcctttgtccccaggacagctggcctgcctgcagctgtggatccctccctggaacacttccagccctaaagccctgcttgttctccacgtactctctctggtctgcttctgacatactgggagcccaggtgacagcagaggacagaatagctgtgttatgtttagagtgtctaagggaatgtccaattccttgggatctctctaccatgcatccttgcttcaagaaatcttgtatctgtttataaattgagactcgaaggcagcggtcattggtccctagtcagtcatcaagaggagccacaaacctcttaaaatgccgaaattatcatgcatctccatcttccccagtgactggcctgggaactatgtcctactttcaaggctcctgggaccatagttattaagttccggggtggacagtagggtaggtgggaatccttgggcttggttctgtccatcttcatatccttcatgagccctgtttagtttcctcatctacaaaatatccggatgatgtggcacagtcattggtaatgtccccttcaactggaaaatgcaagactcttggctttgctgtctggccattgatgtcatccttatgctgtcctttccatttccttctgcctcttgcctcatgcactgaggatgtggtttctcgagccctgtcatttgtttagattaaggatacaggaagggacacatgttgccggcatggaacggatggagctctctgggcttggggtacagttgtaaatctcagtagcccttaggatatggcatgtcaagtcacctcagagagaggcctgggagagctggcctaggatgtcttcttctcccagaaggacatgacatcagttatcagaggcgacctttaagaacaaggctaaagtttatccacagaaggacagtagttgaggatgccagcaacaaatttcacccattcccttctttcacaagcaagcacatagtggagaacaagtaagcacatagtgtgacttccatgtgctctatagggagtgctggctgccgatacatcctaacacatttccactgtccccttggctggcactgccttctgagccagcttgcagtgtctcagtcatttttctgagacaataaaaaaagtctcagtctgggtaattataaagcataaatatggatatgattgtgtatgcctatagtcttatcagcaggctgacacagaaagctcttgcaagcccaggcatttgagaacagctaaaataggcagactgtcttttaaagaagaggagaactgggcatgatggtccacatgtgttaattgggaggctaaaagaggaggacccgagttcaagatgaacatgggcactctagtgagaccctatctcaaagttttaaacaaaaaggggctggtggtagagtatagattgcttctgtagtgtaaggccctgaatccaagcccctgcatcatgaaaagaaaatggcttgggaccgtggatatggctactgcagggttgagtggttgcctagcttgtgcaagaccctaggcccaaactctagcacaaaaagaagaagagagaaaggcttaaagattatggccctggagagttgggcagtggttaagagcacttgttgctcttacggggacctgggttcggtttccagcacctacatagcagctcacatctgtaactctaattccagtgggtctggcaccctcttctggcttccgcaggctccagtcatgtatgtatgcacttcatgtacacacattcaggcaaaatactcacattaaataaataattaatgaaaaaaagagtaatgcaatctcacaatctgagaagatggctgcagtatctattcaacatctgtggggccccttcttccagcatgaaaacacggagaagggcgtcaccacacagaaagccaactctgaccagtcggtcttcctctccttgtagaccaccaatgctgtcaagtggactcaccttcctgactttgctgaattgccttccgaaggtcccagcactaaataaccaagctgtgaacatggtggaacagttgagccccagagtggaccattcttaaggctatccctgccttctctgtgactcagttcttcataagagatactctagaccttcctccgccctcctggggtcaaagtgtactagcatttctctagatcctttgtatgctgctccaggccatacctatttccagattgctcctgggtagcttctaattgtcctgcagatttttaagctacacaggtatctgccagtctcagcttttgccttactcaaagcagacttggttctaccaaattctcattcaccgcgagatattgactcaccattgtctccatttgataaagatggtaattggagcctcaggttcaatggtagagcgcatgcttagcatgcttgaaacttggggttccatctccagcactagaaagagacagagaggagagcgagagaggcagtgtggaaaatcgggcaggcagcctggcatacatagtctctagtcaggttcttgtgtccccaacagatgaggaaactgatcagagaagccaagccacctgctcagtccccagcacattagtacttcacacttcaacctggtctgcagatctgactgccagtcctggacaacttttctgaccccaaggccagacaacgcctcccctgagcctggttggtggccctgctcaggtgctcccttcccatgtctccccaggaccaggcagctaagaacaaggccctgcagagcatggctgccatgtcgtccgcacagatcgtctcggccacagccttccacagtaaaatggctcttgcccggggccctggctacccagcaatctcaggggtaagtggggcagcccagagcaagaggccaatgcagcttttccccaacccttctcttctgcagagtagaacagtggctagcctcaattcctgttttctgagtccttccagggcccattctaaaagcatagctttgcccgtggcagaacctccgcttattctttagcagtaacacagcaggcctttggagagaggcaagaggctgctctcgtaagctgcccaatgagaattggcttaatttatagttgaggaagcagaaggatgggaaccgaatcccaaggctttgacgtcgcacaacggtgtcctcaatacccacccgccacccatcttgtctctgctcctgctctgcaccccaagagtgcccgtgccgagtggagagctgctgtctagggacaaatctgtgctcagatttcaactttgccagcctaacagccagtctctaagccatgtccgcatcgtcacacttttagaatgttccagaaatggtcctccttcccaagcttgtcctacagcctgaatagcttttcaagatgccccacttacactgtcctcacagatggggaagaaccattgaatgtcttgaatttcacatgtctttccgttatcatagtcatagagagtcttggtgttagttggaatgttaaatagatgggacataaaatgtttgtgttgacacttggattaaatcattcttttttttatgttcgagatgggaacacacctcaagagcaagctaggcacacgctctaccactgagcccctgagtagacttcttggctctgggacctcagagccatacatgctttagaggccttacattgccctgtgattcctgatgggggagagaaagtgcccaggctgggctttccccatggagcatagagaaaaacacacctaggtgtggccgctgcctgttagcattggctcgttaaacagaatcactggcttgtcttcctccactgctggaactaccttttttccacctggaggcccgcatggcctctccctcacagactctccccacgctcctctcgcgggttctggccccatgcacaacacagctgtgctgagtctatactttttttttttctctccacagttttggcaaggagctttgccaggccaacctggaacatcccacgagtgagtatggtttgccttcttacccctcacttcctgaaccgagcctggctaggggagatggggcagggggatacgggctgcatgcactgtgcgatcagcctattcagggtagctttgctctcagacatcacttacttagtctgcagtgtccacactcagagccatttacttaaatgcttgtctgtatagggtgtaggtggaactaaagcttgatacccaaaggggcatcaggttggccccagagaggatgcgaggtggattgcctcaagagatatattgcttctataactcaaacacaaagcctgggggatttggcaggggagggtgttggaaaaccaaaccagtgtcttctaaggcctaaggccaccaatggccaagctaccagagctcctccaacactctccccagagcctgatgcctcctctctcctttctcctgcagtgtgaaacctttctctcaaaacacctaccctgtccagcctccgctgcctctgccaggtaggtgggtggtgcatgatccctggatgtgtcacaccctctgcctcctgcctcaggtccctgctcttaccactgcgagatgtcatgctgcagccatgcctcatgggtccctcatggcattctggggtgacaccaaatgctgtacttgtgctcagggctggctggattggattgacacagaatggaaggaagcacttttgtgcccaggttgcccttgtagggtacatgtgctgctggctcttcaggctttcccctcggagtgctaccatagcttctcggttgggagctgagaggcactggtttccaagtacaggagaccctgatgcctgctgggcattgatacctaagcagttgctggtttggtccctcccccaggcttcagttctgaccttctctcagggggctcccttagctctttccacactgcagtccaggccagggttttgaaccttcttcgggagagaccagccataccattctggttgtggcccctcaggctttcctggcagccctggtgcctgctcactgcttccttcatccccatacagagcctctctgagttgggtccagacctcatgtccctgtcctcttttctgttctcttccctctgtccatgctgatgcggtctgcactcagatccacccaattcttgcctggaatactgcagtctcctcttcactggctccctgtgattcccaaagctatgcttctctggccatgctattcccagcctttaagatgcttctaggcagcgtggttcctgttggtgagctctgagctctgcagtggatctgcctgactcctgagcctcagcctcctgtgctccctgctcggcctctgggctgtggccgctgctcctgggccatggatcctctcacctgcccccacccaggttaggtgcccactgtttgcccacccagggctctgcagacctctgtctagccgaggtagtcttctttgccgttcctgtttgttctaggccagctgtatctgcgtatccttgtgggtcctcacactctgcacaccttcctgggtgccctggggctaaaggaaggaaggaaaggatcaatggatgccctcagcatgggctggtgtgttcagcatggctggcttctctcctggactgttctttcttggtctcctctgccttttgtttaccctgggctaagtccacggcttctgtccaggatgctagaggccacgaggctcacagaagaaaaatctggatcctgaagaccttgcctctaccctgtctccctctgtcccatcccttttccacaaggaagaaggaatgaaaaactgcccagctcagcagcagggagcttgcctagattgctatctgcatcagaaccacagctcccatcttaaatggaataagggatagtttactctggagccattaggattgagcatggcctgggaacacggatttaggctaccccaaactccatgtcccaacgtggaaatggactcacacatgaatcaagacaactttaaaatacactggtggctacaccagagaggcaggcacaatgagatacagggagctattctacaggtctaagatgctctgtgctgacgcccttggcttttagagtggcagaaactagtgttctgctaagttaacagctttgagaggtggctatttattgccacgtggtattagttcagatacagagtgaggtaaggaatgcctgttccagaagactacaactagcttaaataaagtaattagcctctgaaataaattcccgatcttcctacagtactgacattccaattggcccatcagtctctgtagacgcagaaactccttccaggagtgttttgttcccagccagacacagctgcttttcaggattttttttttttttttttttttttttttgggttcacagtgcttgctccaggcaggcttccatccctagtattaccaggaaaaaaaaatgtgaagctgaccatttctcagcccagcttagctcatccagtggccttccttgacttgggaatgaaatccaccctgtttgccagcatcctggctctctacagagccttgtttcccactaccaatccagaaaggtcttccttaaagcttggctttccagattcagtcagctggttcccagcccccacacatttgctttggctggtccccagtttggagcaccccccaccccatctagactctcctccttcctccctcccctctccctctttcagctctgtagagcagcctagcctggaactcacagcattctgcctgcctctgcctcctgagtgctgggatcaaaggtatgccccaccactgtcctgcttcttaatgccttctttaagcctcaccttcctgattggcctcaaaggcaccaagaagtcttctgtggtgctgggggccctcccacctcatcaacactagcctaggtctgtgttcactccttagaaaccgttgtcataattggtattctatgggtttgaggcaactgtgagccctccaggaaacttcctacttccagggcctctgaattagtgtgctgtttggttcacctggctatcttcctacctggactagaaattaccctagggcaagaatccagcagtgcctgccctagttgctttccaggcaacctgggctgctgagaatccatctgcattgatcatcggcctgtgcagaagcttgggaccactgagctagatggggcacagggtctgccctgccacggcacatgttcactggttctgtcatgttcttactgaggataggaacagggaggacaaggagggccaggttccatgtgtctctctcccttcatgtaggctttgagtctcctgcagggcccaccccctcaccctccgcaccgctcgctcctccgtggcaaggccgcagcatagctagctccaagctctggatgttggagttctcggctttcctggagcgccagcaagatcccgacacagtaagtccctcaaactccaagagaggccatcttaatctcagaggttctgctgccattgtagggccccagtcttgcaggcccagagtaagtcaccaatcccacaggccttgtccctaaagaaagtcctcgaatcctgcagcttctgtctccatgctatatgccactgtcagtggaggccctagccacatagtaggtcccctaatacccacactattaaatgggttctcaaccctggaagtcctgcccccatagaagacctcaccttccatccttcctgccttttctggcttccttccctttcttccccttctccctcagatcttaatagattactcgttctttcttctcccctcaactgtcttatatgtcatcactctctcctcccttccccttcttttactctgttctttcccttgctttgtgtctatctcccacctcaagccttcctggctttgttctccctttctgttctctcaggctgtctcttatttctcttcttcttctagtgtcctttcctcctaaccctgctccccccaccccgtcccccactccttagctctgaggggctatcaggaagctagggtgactctagtggggaatccatctcatctgagacaatagcagggtacagcaacaggttactcctgaccttgctcatctagagttttactgctgtggacagatgccatgaccaaggcaactcttataaggatgacatttaattggggcccactcttttggctagagaaaattctcaatcagacaatctcagacggattgttcttttgtccacagtacaacaaacacctgtttgtgcacatcagccagtcaagcccaagctacagtgacccctacctcgaaactgtggacatccgccaaatctatgacaagttcccagagaagaagggaggcctcaaggagctatttgaacgggggccctctaatgccttcttccttgtgaagttctgggtaagccctgggcctctcttcccttcattcagtgccttgagatggtgaggaaagctggaaagagaaggcacagtggtgtgtaggagaaaaagggggtggggtggggcgtcaggggggaacacacacaggaggccactctccgcttgtggaagctgggtgtcagattctgatagtgaggccatagagctgtgcagacaaaaggcttttggcttttgtttcctttctttctctctcctttcctcgttccgtttctttctatgccggggatggacagctaactgggatagataactaaggtatgtttcccaaatcctgcatgagctcaagagactctttttggatggtggctgtggcaagatcctggccaggaattggggggtttaaggaggcagtagtcctggggaaagactgagaggtaggtaacacagggctaggaggagagtctgcatggttggttctgggcctgatgctggtccccacctggttctccggggctcatctgtgaatcttaactgggctcggcagagctgggaaaagaggagaatggcttaggatgtctcttagtgcagccccgcctcccataaggaaatactcatgtctgtctcaagcagtcctgtccacaggcctggcctctgccgctctcctcgtccctctgtggatgctgggtacatagagtcagttcataagatgctctactctgagatcaggagttacagaactgcccacagctttcttccagggcctacaacacacagaagggacatgggggacaccagggcaatggctagtaagggcaggaagtcctccaggcacctgactgaacttcagatatggaatttttttcttacaccaggcctgggatccagtgctgactctccctgctccctgtggtctctgccacagaggaccacccagatgctctccttagatctatggagtgcactctatttagttgctcgctttgttgttgttgttgttgttttttggaaccgtggttggaggcctggatgtcagccttggtagacaagtgttctacctttgagctgcaccacagccctgccagctggctcctctttctatctacttccaccccagtctaatttgctcccgagcctgttggtaaactgggagtctctcgtcttggaaagaacatgttgacagtgaaggtggatacaatatcccaggtggcttttagtccctgcctaggaatgcccagcccagcccagctcagcccttcctactgctgagccagcacctggctctcaacagaagactacagtgctgtgttagagacccggggtcttacctagatagacagtgtgccatttttgccctgtgattgcaggaatagctggttctccaagcaggttggtgcctggatttggatctgaggtcggcaggatctgctaggcagagaggaggaaggccatttcttccctagcaatggatgaagagaaacaggagaaaggagcagggaggtctgaagaaaggtacctgagacagagtaatagaaaacagagcagctgggcagtggtggcgcacgcctttaatcccagcacttgggaggcagaagcaggcaggtttctgagttggaggccagcctggtctacagagtgagttccaggacaaccagggctacacagagaaaccctgtctagaaaaaaaaaaaaaaaaggaagaagaaaaaaatagagcagctaaggtgatggttctagatggtccttaatttaaattctagggcttaattaatatggatgagaaatatgcagtgtgtgtgtgtgtgtgttggtgatcaactcagggctttatatataaagcgcttgctctactgttgtgctacatagcattccactgatcttagacaagtgtgtttatagttatgaattccaaaagtctttaataagtaaggaaaagcttttgattcttgtactgattccttcctaagacctggagggttaaattgtgatctttctttaagttttatatcctatgttagtaaacatttatgtcactttatcttggtgtcatgactaaggcattctagatttatctcattatagaataaaaacccgcttcacatccctttccattacctgagactactcccatggagcgagtcctatatccttgagcaaaagccacacaatgtttgcaaagagctgaaggctatgctgtgactacgtttcctctcttacgtgccttttctttctcctataagtaaatggatgtggtttttttgtaaactggggatttaaaatgaagttattcttaaaattttatagatggccccatgagagccaccctataaaactgactcagcttcctgggttctgggattacaagtgtccaccacatcatgtagcgtatagcagccatttgtaaacacactgctctgctgccgtgtgatgcctgtcttgtcttgtgatgtgtgtgcctggtgccgttctgattcactctacatagggaattttatgatctgcttttctcctttctgaaagttttaatatcgcctcgatttctgtgttttcaatttcatattgatgatctttgggttatatcttgtctttcttcccatcgttagctctaaacttggtaggcatctttaatgataagattagagtcttcccatttccggacatttaagtgtgtcatttctttgaaaatttctctccttcattttgccaaatccctaatgctaccccagtccctggcttatgctctttgttttttttttctttttcgggaggtagtaggggagttgaaactgaatctcactgaatggtctaggctaatctgtgactcatgatacagcccaggctgtcctccaacttgtagtgatcctcctgtctcagcctcccaagtgtcaggattattggtgtgagtcatcactatgtttgtgtgttgactgtctcttgtcctggagatcactaagtaggctagaccaaagccccagggctctctcccttccccacctcccccaaccccatctgggattacaagtgtggccctgagcctggtcctttttcatggattctgagggttgaattcaagctctattcttgcaaggtaagtccctcaattactaattttttttatatattttccattttatttgcctggtttcttttcgtggagacttgcttctcttgtcgtctaacttggattggttatatctgagtgcatattatccaaagcccaaggcatcatcagtgcataaagcagtagttttccattcctatagaagaagcctggtggtggagcctccagggatgagctgacttctctgtaatagcccaggagcctgagtcctctctccttgtcatcctcagtgtgtggcttctgttctcaaggtcacggacaccggaattccaaccattatctccacattgcaaacattaggaaagaatcctatatagctccctgtgggttcctttctaaagtcctacaccaggtgtaattatctgtatggctgcaccttgctctgatgaaccagggagatgtgaactcggccgctttgctgtgggtttcagttagaatcattggggtaaacaggcagcctccagtttctcatgtgtttaggggggagtcctgggctcccctccagagtgcattatgttaactagtggctttctcagcgctggtccagctgccccttgaatgtgactggggtcagaagggagacccagctgtcagtgcaagatgtggttatcagtgctataccttggaagacaaggcatatttagggtccttctcgacagctcatgccttcttttagctggtaggctggtagtttctctctctctctctctctctctctctatatatatatatatatatatatatatatacatatatatacatatatatatataaacatatatattatattaattatacacatgtgtgtatgcatatgtatgtacgtatgttctgtgtatagggattccagggccctgcctatgctaggcaatccctgtacaaagcatgccaggtaagccctatacagctgagagctacttcctggtgcagttggtggcagtagtttttatctacagacacatttcaaataaggctcatcttagaattccatctcacaaacagtagaaactgacacattgtgcagacaagggcttcagtctgaggcatgcttccttggctgggtctcttattcctgtggcctttctcagtatattcagggaagacaacagatcacaggagcactcgcgttatgaggtcacatggactctctcacttttgacttttgccacatctccaaaggtggatctgtggataatcttgtcttcagaggagaaagggaaacatgatcagagtagacaattttaccagacttaacccagtctgctgaggactagagccagacagcagacctcaccagtaaggctccaaggtcaggcaatgccccccagacacagctttggtgctcaccctggtcctgggaggaagctgtggattgtttgaaagactccaagggatgccaagggatgttgttggtaacagagacgaggtcagacttcactgagatcatgcaggggagcaatggggccatttgattttctagatcttaaccttcttcccaggaaacgttggcaaagtcttccaggtggaagtgagttagagcctccctctgttaccttgttaggcccatttcctcttttgccttcccttaggggataggggggagggaactgacagaagaagtgggtgctgggacagctcagatgccagaagtttgactgggcaggtcccacagacatgcttggatagggctgtattaaaaacccacaaggccattgccttctggcagcacaaactccatagcaagtcttggacctgggccagcgcagcacatggtggctatgagagccctcaccctgttgcaggcagctggcttttgggcttagcggttcctgtgagattaagtcactcttcctcctttctttctttttcttttctttaaactctttcctccctcccttttcccttttcttcctttctttcttagatttatttatttatcccatgtatatgagtacactgttgctctcttcagagacaccagaagagggcatcagatctcattacagatgattattacagatggttgtgagccaccatgtggttgctgggaattgaactcaggacctctggaggagcagtcagtgctcttaaccactgagccatctctccagccccagtcactcctctagagagctgcatcttaagagtaagtcttggcttctgtgcctctgtttctccttcttaaaggttagctgttattctcatggccttcaatctgggagctcagatgagatcttatcctcaacctgagtgctgcctccttaagggaaggtgagcggaggtcagagagagctggaaagtggaaaccccgtgctccataaccagttgaaaattaccaggggctgcctgtccttgtcaggggaaggcgtgccatttggcacactgggtggagccaggacaattccctgggcctttccatcatccgttccacagctcccttctgggcccgacattcctcccagacacatgacaatcaaggctgtctgctcatctgtcagtcacccgatccctcacacctgttgcaggcccagtcctggagctgcccaccctcacggaacagctatgaatagggtgcatggagggggtagtgtgttccgaaggctggccaccgagaggaacagctgtcctgggctacagctgcagggtgagctggtggtaaagtgggatggatcccggaacccaaggacaagccgaggcaccttgaaaggggtcctctggcattagccaccacctcgaagatcagcgtgacactggcccctccctatctcacggatcctactttgttctctgttacaaattctttcataatacacaaatattccgtagccttttcttgccccatagtccccagaagcactggtgttttgaaaggatcctagggtgggaggtgactgaagtgtttgcaggtctcaagtcgaggtctaggactcaggggtaaagtatatacccctatacccctatacaccatatatacatacacacacacatatacacactcatacatatacatatatatgtatatatatgcacatacatatatttatgtgcaatatacatacatatatagatatatagatatatgtacatatgtgtgtgtgtgtaatatatatgtattatactgaggtgtcttacatctgtcacagcaccgcccagagctacatgccaacctttattgaaaggcctggtgtgtggccactgagtaagatttgtagagtacaggactcttgcccccatggaccttcccctggacaagtcacatgagcatgaggtgcagagataggggcaggctgtctttgtgtgtggctggagaggctctttggtattgggtgttcccagcatggtatttggggatgtcttataagtgctacatctactgacatatcttaacaaaccaaataaaacagcaacaacaagcagagtccttgttttcatggttgtattgctgagggtaaaattacaaataaaagagagtttatgtcactaggtggtggtagcacactttttaatcccagcagaggcagaggcagaggcagaggcagaggcagaggcagaggcagaggcagaggcagaggcagaggcagaggcagaggcagaggcagaggcagaggcagaggcagaggcagaggcagaggcagaggcagatggatctctgagttcaaggccagtctggtttagagagtgagtcaggacagccaggactatacagagaagccctgtctcaaaaccaaaaagaaaaaggaaaaggaaagtaaattgatgttaaagatatcacaagggtcagcgatatggctaagtgaggaaaggtgcttgcctttaagcctgataacttgagttcaactcctagaacacacatacttgaaagagaaaattgactcatgcaattgtcctctgacttacacatgcccacagtacaacatcacacacacacacatgagtccacatacatcatcatgagcccacaagtatcatcaaaagataagaaattaggtggatacctgtaatcctactactcaggaggatgaagtcaaaggaatgagggttgaggtcagcctggactacacagcaagttcttggttcaagcaaagacaccatgagggactggtgtggttaatgagggtagcattggtcagagtcctgtgagcacatgtctgtcatctgagtattgttaccatatctctggcctcagtaacttttcagaccactgggagtcatgacagtgttttgttttcttgttgatgagtggtcagcatttctgccctgttctagtcacagcataaactaagtctctcaacgttttcaggccagtctggcatactaggtctcctgggttgctcatatgactttgagaacgtgggggagagcctgggttcaggtccctgctcacctcatttgtcaccagaagaacttgagccatggctgacccacttcctccaggactcatgggttgctctccctgccttgctccacgccctgcagctgccctttcccactggattatgatggacacggagtggggagtctgaagccatcctggggatagagagtgttcagtagaggggactgtttgtttcagaggctaaacatcagctcggatgctgcagtgattgtttgcgttttcttccttctaatgaatggctccacttaaaccatacatagtgcagagacattccaaaaaatatctcttcgtactgttccataattgctttcctccttcagcaagtttcgttcatccatagtggtgaaggctagcccttcttagcagtgtgcatgtgcctctctttgtgtgtgtataatatttctcccacactaccttaattacagcataatcaacactcccttgtcagcgtacacaaagattttgctgtagaaaggaggtgccaaaggagaaaaacttgtacttgagtgtcacctagtggtgtaagactgcttgtcacgtgcgcccaactcctacccagaccttcctgggttctgcacaagaatagtaggtctcagaacctgcctcaggattggcagtgcacagcctgcactctggtccatgtggcagttccctcggtgttgtgtggtaggtgaagaagtctcacataagagtcatccttctgggcagtactggtacacgcctttaatcccagtgctcgagaggccctcgtctacagagcaaaatccaggacagccaggggtacacagagaaactccatctcaaacaaaaaaacaaacaaccccgaatcactgttttcatgactgtattgcttagggtaaaatgaaggaaggaaagagaattggtgttgatgggcagctgtagtacacacctttaatcttggcacttaggaggcaggctggtctacgtggtgaattccagggcagccagacctacatagcaagaccttgtcttgaaaaaacaagaacaaaacaaagaattggtcttctgtatgtcatttgtagaaaaatgggtggggttagaaatcctcatgccaaacagaatcaagccaacccagccaggcaaatacatgtttttacacacacacacacacacacacacacacacacacacacacacacacacactcacacacatattcactatacacacacatacacacacacactacacacacacacacacacacacacacatattcactatacacacacatacacacacacactacacacacacacacacacacacactcacacacatattcactatacacacacatacacacacacactacacacacacacacacacacacactcacacatattcactatacacacacatacatacacacacacactacacacacacactacacacacacacacacacacacacacatgtttaaaagaacttcttaattaaaataaagaatgtcagtgagatggcttggtatacacccctgcctccaagtctattgattcacatggaggaagaagagaactgctaccccaaagttgtcctttggcttctacatgcttcctctggcgtggctgtgctcatacacataaaattaacaagcaatttttttcttaaaaagcccaccatgaagcaaaagaaaccctcccccccaaaactaaagagccgaaggggcgtccttctggaaacgtttaccaagttcagccacatgggtgcccagaggacaagtgccgtggtctgtggggacccatttatctcttgttagctgcagaacttgccgttcattatctatgtgtttgctaaaggcagaagttgcagggtcatgggttaacaccaggtttgagaaagaagcctgtggggccacacagtgcctgtaagggctggcttctctgacatgtgagggaagactaacttccagtagaagcctaaggacattgaaactgctggggatgtggggtgtctaccgaagaaagccgcaggtacccaggggagccagctcctgggagaggccgtagctgcaaatggcagagccatgggtgctgggatgcccgagctcttgcacctcagatatatcatcttaagccctggacattaggtatggagctgtagaatttcatgtttgctttgctaagtcgctacctttttcttttttgaagattttatggatatgtctctgtggatatgtgagcacatgtgctgcgggttgggggctcatggaggtcagaggagagcagaagagggcatgagctgcccactgtgggtgctgggcgctgagctgcccactgtgggtgctgggcgctgagctcaggttctctgtaagcgcagcaagttctgtgatgcactgactttccagcaccgagttccttcttgctgctctcccttgctttctcgtcgacatggggatgtctctttggctctatgctgagtgggaactgtgtggtttcccttctgatggtgtaaggtctatagctctatgtggcttcctttttgattttgcagggttcatagctcagactacctcagaagagactatactctggacacttctgactaccatgtggttgtagtaagagacggacatgagcctttctgggccaggcacgtgttttgaatctgtggctcccacagattggcatttggaatgctcagtcctcagcttgtggctctatttggaagtttatacccactcctggtttgggcttgtggcctcagcttcctgccccatgccatgtgaacagccaccgtctcatgttttagcaccagatggaatcatctgccatgcttccctgctgtgagggtctgagatggcgagataaccccctcctctcttaggctgtctgtgatagtcacagcagtcctaaagtaactaatacaataggcaaccaagaattaattcatgcgctccatgtgggcagctatgaacttatttcttgttgttttggggaacaaaccagaaagattggcaccgagccaggatgtgtgggtagcagaggctttcctatgactgccctgtaccaattttttctttctttttcttctttctttctggtccttccaggacaaaggttctctctgagttgtacccaagtcctgccccttacccccccacacacacacacttttgttgaaaagctcattcatgaaacttttattccacttacacaaactttaattcatgtgctcttaacagttgtgtttggattgttcacgaaaatttcatgacatcaaaacaaagctaggcctcatctcaagttatttccatgtgtttgtttttgttttttgtttttttttaacaacacatacatgtcaagcaagtatcaaaaaagaaaaaaatcacaaaagctaaaaagaaaaggctaaaaaagaaaaaaaaagaaaaaaaaagctaaatccttgggattttgtttacagctgtgctttgtttacagtttgtttacagcagttcatttctgctgcgtctcgacttttgcatttgttcttagattgcctaaaacatttaaatacaagtaaactatgtagcaaaaataatgaaagcaagtagcacgtaaccttacaaataatggaccatgaactgtttcttcccttagagcagactgggttacagctctgcctagggaccactggtaaagggtgtgcatgtgaagacacaggatgtcaatgtgtgtccatccactggatgtttgtaccacagcctaacaggtgccccaaaccttaaagtacccacagacaccacactccaattatgccttttgttccttaccagcacaaaacgaataggcaggcgattttctttgcttagccatggaagcagttttaacattggcccttctgaagccacaatgtaccaagaatactatgctaaacacacgtaactcctgtaaaaattccacatccccatattggccacttcaaggtaaaaatgtgtacgttcttaaagtcaaggcatgtgtagacagacagacagacagacagacagacagagtcttgtatatatctcaggatgatctagaactcagtctttctgccccaggctactctgctgtccctgccccattcttttaaagtcctgttctctggtccaagacgtgcactgggcactaggaaccctaaggacacacctgcaaacaaccccatctccccctgtctccggcaggcagacctcaataccaacatcgatgacgagggcagcgccttctatggggtctccagccagtacgagagcccggagaacatgattatcacctgctctacgaaggtctgctcatttggcaagcaagtggtggagaaagttgaggtaggagcctccctggtgggtgtagggcaaaagggtgggctgtgtgccttctcttggggccaggattgctaagggggcccctgggcagaggtggacgccatgcccctttcactgcccttaaggaagtgcatattttgggttgggcatgaggcatctggtaagttactgatttaattgcctgtcctgcacctcagagccctggctgagtcttctggctgggattcctttcaagccttccttggaagcatcccacatctagagcagggccaaagcacaggctagcccaaggatttctccctaatccatctgtgtctctgacagctgagtgcggggctaggagagaggcctttcccaggtacacagctctctagaggcagaggcaggggaggtgggtgttcagggtttgctgtttactccttgagtgctggaaacttgtggagtccctttgctccagttgttggggtttctgtaagaatctgggtgtgctaggcaagtaccctaccactgagaataccctcaatcaatccctgattcctccttctccccctctctccctccttcctttcctccttctctctccctccctctcccttcctcattcctttccttcatccttccctccctccctccttctctccctccctccctccctccctccctccctccctccctccctccctccctcccccctcccttcctcccctcctcccctccactcctccttccttgagatagtctttagatgctcctacccagaagcacagagctcacttttcaattgtggagtgccccagagaccttacacttggggcagaatttcctgcttctcttcagggcaggcagcctggtggtgagcacaagcttagaggccctgtgttgatctctgcacacctcccccacccccacttcctgttggatgtttggggttgtgttaataccccacccccatctctaaggaagtatcagtttgtctttatcatccactggttccaattgcagtgacattcccatcctattgtgtagtgacaaaatggcaccaaagcctccatcccagcatacctgtggccctaaagtctatgaccctgtctgtgcaatgactaacactgtgcatggtgttagtctggtcacctcttggcccatggggaactgaattgatgctgttctccacctgggggtgacagccacctcatgtcaaacagctaggtaccatgaaaagggaccgctgctttgcaatcccaatcctagaatggccaggaagctttcgatacgtacgtgttagcaccaccgatgctcactcatgtcactgctctccatcttgggagcgtagtccagttgtagcactgggtgtttgcaagtgtgtcgtgttttgtttgtttgctgctaaagatggatgcccgggctcactgtggctaagcatctatctgtcctgcctcggcaaaggcagtttttacaaagctcctctagctatttacttttgttaaacgtatcgaggtattgagatgcccgtggctctagccagtcatcatcccacatgccatccctctagctcctaggccaacagtatccactaccaaggttcatgcacgtggcagttccatcttgaaggcgctgctattctccccccacctcagcctcatgtgcaacaacgcctgctcacttgccctatctccttgctgctacttcggctacttccaggtctcccggaagtgtctgcctgtctggtcagtgacaaaagggagaggcggagaggcctggcttcattcatgcccatgaacctgagaggatgaccctacctgggacatccctgccgacttgggcttgggctggaggggaagggattctaagcctctgttgtccctggggttctacagacggagtatgcccgctatgagaatggccactatttgtaccgcatccaccggtcccctctctgtgagtacatgatcaactttatccacaagctgaaacacttacccgagaagtacatgatgaacagtgtgctggagaacttcaccatcctgcaggtatgatgtggggcagatgcccagcgggtggtgccgacggcagcttccgtatccagggctttgaccctcaccaccttctcgcctgcaggtggtcaccaaccgagacacacaggagaccttgctgtgtattgcatatgtcttcgaagtttcagccagcgagcatggggctcagcaccacatctaccgacttgtgaaagaatgagagacttggagagcaatggtaggggggacaagtccaggacatggggacctgggaggggaccttcagggacagtcccctggaagtgccaagagagccaagcagagttgccaggtctcttcttaccaggagcaaactgcctgatcttgcagtgctcaacccccaataaacccaaggtgtcaagtattttcagaggagctagtttggcctgtgtgagcccagaagggcaggggagaagggggcatcaggaagcaagctggaagcaatggcccaaagtactccaggacagccaaggaaccagaaccccggtggactcagccaggcatatcaccaagacaccaaagctcaagacccttctcagctgctggaacctcacactcctgctgctggtcaccctagtggcctgaggacagattgcacgtaggtcacacacccagagatgctgtgggtgactttatgtacactgtctgtctgtcctgccatcggtgcctgagaatggctactgcagaaggctccatccctgcaaacagggctgggtttaggtgtggctgcaacatagttgttggagggagactgggtaagagctactcgggtggctttgttctttctgcagtggccctgcagggggcagggtctccaaactgaagcaaggcttggaggtagggcgtcctgcctcagggccagcatttccagctgcctggcctccacaggctcctcggcttctctattagtctcttttcttctctgctcagcactgacgagggagggtgtctgtaaagtacccgggtcttgcggtgccagttaaataatctaatcctcagccccattgcttctctcactctggagggcctggatctgtctctctgctgccctctcaaggctttctggtgtctgctttccccagttggagccagttctaatagtctggagcctcaggaagaaagatacaacctgggcatgtttgtgtgtatccaggactcagggatgcatctgtgaggatgcagaaatgggcagggcagcattgtggtgatgctacagaggtgagggacaagggctctggagtcagtctagcctgactttggtgtgcaacctttaaaaaaaaaatgttgtggtgcctcagtttccccatctgtaaaatgggtataacattcacctacctcgtgtatggacagtgcctcacacagtgctgagcacatccacatgttcaataaatatgcattggtact

SEQ ID NO: 72 - DNA, 83100 bp, Pan Troglodytes
  misc_feature (8805)..(9103): n is a, c, g, or t
  misc_feature (26151)..(26428): n is a, c, g, or t
  misc_feature (28533)..(28542): n is a, c, g, or t
  misc_feature (32366)..(32748): n is a, c, g, or t
  misc_feature (65760)..(65760): n is a, c, g, or t
  misc_feature (65764)..(65769): n is a, c, g, or t
  misc_feature (65771)..(65772): n is a, c, g, or t
  misc_feature (65775)..(65776): n is a, c, g, or t
  misc_feature (65778)..(65778): n is a, c, g, or t
  misc_feature (65780)..(65780): n is a, c, g, or t
  misc_feature (65782)..(65782): n is a, c, g, or t
  misc_feature (65930)..(67086): n is a, c, g, or t
  misc_feature (71344)..(71344): n is a, c, g, or t
  misc_feature (72077)..(72364): n is a, c, g, or t
ctcctcccccaggtgccggtggccccgccgccactccctccggctccctccctcccgccgcggcgcgcatctcattccagccctcattccgcgcattccagcgtcctcctcgcacactcgaggccagggggcgggagggccgcagctccggcgccgccgcgtcccgccaggtgagaggcgcccgggcccgccgcacccgccggcgtcctcacgggccgcgcgccccacgccgccgcagccgaccgctcgcgccgcgtgctcggctgctcttttctttccgccgcccgcgttcccgccttggacctctgcgcttcggcgcgctccgtcccgacctctggcttccctccgcgctccggcgctgctcgctgcccctctcccgcttccctcctgtccgccccgcgctcccctcctcgctcccggttgactcacttctccaggaatagggatccccgtgttttcccgtcagtcccattctgggaaaactcctccctccgcgcgctccgctccgctccgctgggcgcaccggggccggtcggcgcggggtgggcttggccccgcggccccgccttcactgcgccgcccgtcggccccggccggagcccggctctgcgcgctgacgccctgtcgtccccgcagagcgatcgccgcggccggaagagttggcgctcggggcggactccttggaactggcttagcgcacccatcccaccttcccgcaccctgggaccggtaaggctggggcgcggggacttggtaggactttgccggagggcaggagtctgcgcggtgcgtgcggagctccctcccgggacaagactgggaagagcgaggcacgtggaggcggcgcgactgaggctggtggaggcgaagcggctccaggggcgggtaaggggggtggacactcgggactttgggggaaagggaggccggtgtggaaaggaccggagaggcagaaccgagagcatcggcaacagaagagacccagcacccatgcctcttttctgctgggcccttttcgagcctggaagggagagacctggaggtaagcggactgcctgttttaagtgcaaaggcgatgcgaaagtggggggacccctgcaaaaggtcctacacctcagggcttgggaagctgctgtgtttcttgatggggactagtggatcgatccagggagcagaactttcaaaccccaaagtgaacatttcccccgttgtgctgaggcacttgaggccccgcggactgactgcgtctgtgctgagtctgtgtgacacctgactgcgagtccccctcgctttgagtctgtgtgtgggtgatgtctgttcacgtgtggctcaccttggcttccagtgggcgtatttgtttgtgttgaacgtgagtgacagagtgtgtgtatatgtctgcgtgagaaggggctgtctgaaagtgagtatctctgagtaggtgtgtaatgccacgtctcttgagtatgtgtttctcttcgaggatgttggttctggctaggactgttcttcctccctacatagccgtgggcaacagtcagtgtctctggttgcctgagtgcagggataatttgactgtggttttggagtgtgtggcctccaggctccgtttcccctggaccgggcagagctggaaggaagctgtctccacctgcctcttggagccaggaggctgactttctcagggcgagggtcttgtgcttgcctggaataggtcaaaaagccggtaggaggctgaaggaagttgagatctttgcctttgggggatgggatgggcgagtgagatttgggaaggtttgtcggggtggatccccgggaaaaggagacagttttgaatctggagacttgtgtaaatagtgcttttaagttggccccaaggacaaacagggaggtataccagcctgaactacttttcctggtttaactctccttggagctgaccaggtaacccagtagaagaatccctcattctttccaacttgctagactctcagcacttcctttgagaagaggaatgagtagcttgttgcatgagggcttcaacgtggatatcatgtgtagggcttcttggaaggaaggagccagaaactgtctcgggggttgggggttctcgtccttgctcctccatccatcctgaggatgtggatgttcttgtgggaaacacctcaccctctcacctcttcggcctggtgtgcgactggtctaaaagcagcactgatggagtggaaagggcacaggtttggggtcaggcagaccagggtacaaatcctgagtctctcactacctttaaggctctcaggctgtttcctggtgggtaatacgagcggagcttttctgtccagaaagtttcttgtgaaaagtcgatgtctgcagagaccccacccagtagcacagtgcctggcacatcccatggactccataggatagctgttgtatccagtgtttccttcgcttatttcagtaagaacccctttttcctagggattagtgttttttgaattagtgtttatcggagcaccatttgagaaaccttgccctgtctatcatgtttatttagcaaacatgaattgagcatttactatgagccaggccctacgctgtgttccgcgtccttaggaatccagggtcctagtggcccaggtcaggggggagggggacagacagggctttgtcaccagagaacagagtgccagcttctattttctgattccagttttgccttggccccagggtaagcttgctgaacattattagataccctaatgtcagcatctaagtcccccattttattttactttattttcattttattttattttatttatttttgagacggagtctcgctctgtcgcctaggcaggagtacagtggcatgatcttggctcactgcaacctccgcctcctgggttcaagcgattctcctgcctcagcctcccggccggctagtttcatatatatatatttatttatttatttatttatttatatatatataaatatatatttatatatatatttatatatatatttttgggatggagtttcgctcttgttgcctaggctggagtgcgatggtgcgatctcggctcaccacaacctccgcctcccgggttcaagcgattctcctgcctcagcctcccaagtagctagaattataggcatgtgccaccatgccccactaattttgtatttttagtagagacggagttttccatgttggtcagactggtctccaactcccaacctcgggtgatctgcccaccttggcctcctaaagtgctgagattataggcatgagccaccactcccagccgttttttgtatttttagtagaggcgggatttcgccatgtgtgccatgctggtcttgaactcctgacctcaggtgatccgcctcggcctcccaaagtgctgggattacaggcgtgagccactgcgcctggcctaagtctcccattttttagatggggaaactgatgcccctagagggacagtcacttgcttaatgccgcaaccctggtgagtggcagagcggggattagaacctatgctctccccttggcgttctgtctcctgccctgtggattgcagtgcttgtacaccccctactccccctagccgccttcatccaataggcgcggaagctggagcagactgacgggccatgccttgtggctcagataaggttggtaggaggcagaaatactctgctccgtcctggcagaaagcacatagctgttctggggaaggagccgtctcactgtggaatctgtggagtcgggaaggggccctcgggtctttaaaacacaccctcctctccccttgatgagccggcaggtgaaggttctccctatctttttagatctcctgggttgcaaatgtcacaacctcctttgatttccactctggagtcttgccccggtgactgtcacaaagcaatgcctgttgccaaacctgtggctcctccttctccttcccagtggaagtggaggacattggtccccagctttggaccttgcctttcctgcagttgaggtcagtccagtggcagttggaaattcagggcttgtgagggtggctttaccttgcctgtcttcctttgcccccatgaccctttgttggccggggctggacgacagctccctttaaagctctgaaattggagctgaacagctgctgtccagtaaaggggggtgagggggctgtcagcagccaggggggcccaggtggaggtgggggcagggctttgtcactggggagcacacagtctccagctcctatcttctaattccagttttgcctggaccccttctgagatgacggttcttcccttgcttttggtttttcccgctactatccgggagattctaatcacacctgtgtgatctggccctggggcccttagctggtggggactggatatttgggaaaatttccactagaactcaggtctccaagatctatgcccacgtcctcctgcatttaatacaggggggctcctggaagggccagaggatgggccaggctccctgtagcaggggctggctccttggcttggcgtgggcaggcgggcccccatgggtggggactctgcttcctttgacccaaacttcatgggaacaatagacttcagaggagtcaccaggggcaggaaatgggagctgtgcagaggcaggggtgaccctcctgggggatgggattgcatatccggtagagggttgggggcagtgcagagggcgctggggaggggctgatgacacatagggtgggcctctggggtggggccctcctccaaagggggccgttgactcagtgtgaagctagagctcagtgccggttctgtgctgagctttcggctcttactagcacagggctcgtgtttgccagcctccgctcgtgccacgctcgcccctgccaggacttggtcttccccttcccctcaagcccctgagatgtctttgtgaatcatcctggctgggataaaaggctggtgttgttgctccctggctggtctccaccttggccgtgagcactggacaattgtggctggaacggcaatcttgggttgtgggcaaagctctggacagggagtccccaggctggggtcgctggacaacgtgagggatttctttctttttttttttttttttgagacggagttttgcttttgttgcccaggctggagtgcagtgctgcaatcttggcacaccacaacctctgcctcctggattcaagcgattcttctgcctcagcctcctgagtagctgggattacaggtgcctgccaccacacctggctaattttttttttttttttttttaatagagacagggtatttccatgttggccaggctggtctcgaactcccaacctcaggtgatccacccgcctcggcctcccaaagtgctgggattacaggcgtgagccaccacgcgcctggccatgagggatttctttagccgcaggcagagcgagacagtggaacgtctggaggtggaggactcttatcttgcctccatctttataagggtcgaccagactttgtgagaaggccacagcttaccctgagagaattgtgagtcagaccacacgagctgctttgcctgagttcaggttgccggattctcacagataggctttggggtcccaagagaaggtgtaggagtgaccccagaaccactgccaggacctggaaggagggtaggagtaggagagacaacacatgctgtcttgatttgtttcttcaagggagcaagatggggaccctggaaatggcagactcctagaattgattccttgcccaattcttggttagattttgttttttaatgattttttattttttgagacagagactcactttgtcacccgggctggagttcagtggtgcagtcatggctcactccttgaactcctgggctcaagcaatcctcattgccttaacctgagtagctgggactacaggtatactccaccacacctggctaatttgtagtttttttgtggaggtagggtctcgctttgttgtccaggcaggactcaagctcctgggctcaagcaatcctcctgccttggcctcccaaagtgctagaactgcagatgtgagccatcatgccctgccaatttaaaattttctagtagccaccttaaaaaaaaaaacatgaagttaatgttggtgttttcttaaaccctagtattatcaaaaataatttcagtgtaataatttttttttgagacggagtctcgctctttcgcccaggctggagggcagtggggcgatctcggctcactgcaagctccgcctcccgggttcactccattctcctgcctcagcctcccgagtagctgggactacaggcacccgccaccacgcccggctaatttttttgtattttttagtagagacggggtttcaccatgttagccaggatggtcttgatctcttgaccttgtgatccacccatctcggcctcccaaagtgctgggattacaggcgtgagccaccgcgcccggccataaatttttttaaattatcattattattattatcgtagacagtgtcttgctctgtcacccaggatggagtgcagtgatgcggtcatggcttatgcagccttgacctcccaggatcaagcaatcctcccacctcagcctcctcagtagctgggactgcaggtgtacacggttgcactcagcctaggttagatttttgaacaaacaatatgtggagagtgtgaaaatgaagttgagatacctagtagccaacctgggttcactctaccaagtcttagagaaaacaactctaatttgagtggaggaatgttcaggaaggcttttcagtctaatgatcttcttggtacaagagaaagcagtgtggtctggctgatacagcagggagatggatgtgtgactgcttgaaccaatacgctggacgctgactcctgactcctgggcttgtgttactgtgaggaggtccctgtgatgtgccgcagggctgtctttggcttagtcctctatgttttccatagatacgagcctctcccaggagcctgtgtgtcctgtgtcttctgtttctcatttctttttctttctttttttttttttgagatgggtcttgctctgtcaccaggctggagtgcagtggcgtgatcttggctcactgcaacctctgcctcctgggttcaagcaattctcatgcctcagcctcccaagtagctgggattacaagcacacgccaccatgcccagctaatttttttgtatttttagtagaaacagggtttcaccatattggtcagactggtttcgaactcctgaccttgtgatctgcccgccttgacctcccagagtgttggtattacaggtgtgagccaccatgcccagcctatttcttttttttgagatggagtctcgccctattgcctaggccggagtacaatggtgcgatctcggctcactgcaacctccgcctcctgggttcaagcaattctcctgcctcagcttcctgagtagctgggattacaggcacctgccaccacgcctggctaatttttgtatttttagtagaaatggggtttcaccatgctggccaggctggtctcgaactcccgacctcaggcgatccacctgctttggcctcccaaagtgctgggattacaagagtgaaccaccacacctgaccctgtttctcgtttttatgggcgttgagggtagcaaacattggctgatagaaccagggttcgaaatcatctcagttgactggaatgctgccattaagtagaaagatgaagtttaaaaatatttctctcttaaaattaatacatgtacattgtaggaaccctggaaaataaagaaaggcataaagggaaaaaaatgatacataatactataattcgggtgggctggtatttaggtgaatgtccttccaaatttgtgttcatgcaaatctatatattttaacataattgcaattatactctatcccgtttttttccctactgaatgctatctaatgggtaatagtgcatgtcataaaaaatatttaaaaccataattttaaggatccaagtaacattgcattctatgaccatactatatttaactatgccctactgacttaaaaaattgtttttagtttttagcttttaaaaattacttgacattgagcaatgttgaacatatacttatctcaagaagaaatgtaataggtctaagtgtaacatcctgcatttaagttcaaaacatcaattatgtaagtctagaatagagtgggacttactattcattcatgttgagggaaaaggcttggggtttttggctgaaaaaggaaggaagagggaaatgaacattttaatgcctgttaggtgctagacccattattctagacatttctgccttcatcatctcatttcatcctctcagccctgtgagaaaggtttgctttgtttttgttttgtttttcaacctctactttacagaggggacactgtagaagttatactgcagttggagtttgtacccaggtcaatctgactctcaaactgccccattaaaccataagcctgtgtgggccagtgctgtggtaaggtctgtgtcaagggaaacctttacccactaagctctgtgaccctccggccacactggaagccacatctggttttggaaagtttatatatcctgagctgttaagtattgagctcgccatttttgtgggtcttcctctacccccaaccagtgatctgatctcaaacatgtgggactttttttttttttttttttttttttgagatggagtttcgctcttgttgctnnnnnnnnnnnnnnnnnnnnnnnnnnnnnnnnnnnnnnnnnnnnnnnnnnnnnnnnnnnnnnnnnnnnnnnnnnnnnnnnnnnnnnnnnnnnnnnnnnnnnnnnnnnnnnnnnnnnnnnnnnnnnnnnnnnnnnnnnnnnnnnnnnnnnnnnnnnnnnnnnnnnnnnnnnnnnnnnnnnnnnnnnnnnnnnnnnnnnnnnnnnnnnnnnnnnnnnnnnnnnnnnnnnnnnnnnnnnnnnnnnnnnnnnnnnnnnnnnnnnnnnnnnnnnnnnnnnnnnnnnnnnnnnnnnnnnnnnnnngagccaccgcgcccagccttttttttttttttttttgtgagacagggtcttaactctgtcacccaggctagagtgcagcgttgcaatcacagctcactgtggcctcaacctcccgcgcccaagtgatcctcccacctcagctttctcagctactcaggtctcagtagctgggaccacaggtgataccatgcccgcctaacattttttttgttttaatttttatttttcatagagacaggatcttgctgtgtttcccaggctggtgtttttttgttttgttttgttttaatagataggatcttgctctgttgcccaggctggagtgcagtggtgtgatcatagctcactgtagcctcaaactcctgcactcagatggtcctcctgcctcagtctcccaagtagctgggatgacaggtttgtgccaccatgccctgccaatttttaaaactttttgtagaaacaaggtcttgctatctttattttgcccaggctggtcttaaactcctcgcctcaagcgatcctccagcttcagcctcccaaagtgctgggattacaggtatgagccactgtgccgggcctgtgagtgtcttaacagaggctggatgaggacttagaacctgcccagcatctgggtgctgtcatttctcatttctagaaggtaggcaccctttacagcagtagcaggttaggtccatctgacctgaagtctattacttcattatgtaaaaccacataaaactagtgggccctctgtatctgtaggttccacatggattcgaccaaccctggatcgacagtgttcaggggaaaacattccacagagttccagaaagcaaaacttgaatttgctgctcactgaatgctgcattgaatccatgcaaattaagtgatgtgcatgcgttgtgttaggtatgataagttctctagaaatgatttaaagcacatgggaggatgtgcgtaagttatgtgcaaacactataccgttttatatgagggacttgagcatcctcgggtttcagtatccttagaggccttggaaccgatcccccacagataccaaaggactactgtacatagagtttcattatgtagaacttactagggatgctttggaggagtctctgccctgcatgggaaaggactaggtcacctccagggccactgcttcctcgaagattttgtggtcctgggcctcagtttctccacatatcagcatgcggggattccactagatgaaacacttcgggattcctgctacagggaggtagcgcgaagctgcacctggagttggaggcaaggcttgggacgagggtgcagtgtctgagcagtcagaggaagcagaatggggagatgagggaattattgcgtggctgccatcgtctttgtccaaacgagcatggtgttaggaacaggcggaatctgggtcctgccctgaggctggagggtggggaagatgaccccccacaaccccagagagcagtggctatcagtgcagactccagagtggtgctgtccaatagaaatacaatgtaagcctaggagctacatttaaaaagtaaaaagagctgggtgtggtggcttttgcacatggtcccagttactcaggaggctgaggcgggagagttgcttgagcccaggggtttgagaccagcctgggcaacatagcgagaaccctgcctctaaaaaaagaaaggaaaacttaactggtaaaatgcattgtaataatatattctttaacctatgactacaatattatcattttaacgtaatcaatagtaaaaagtatccatgagatagtttaccttttttccacagaaagcgctagaactgtagtgtgtattgtacacttaacacgtctcagtttggactaaccacgtttcttgtgttcagtaaccacgtggggcgagtggtcgtggttggcactgtgtggctttccagccagcccgcctgggtttgaatctctgttctgccacttaacacctgggtgggataataagattaatagaaccaacctcatacggtgtatgtgaagactaagtgagttaatatctgtaaagtgcttagttctttccccggcacataataaccactgtgtaagtgtttgtcaaataaatgacctataaatggttcttaaaaactgtcgaagctggaatttgtaagaggtagggggtcgatgatgtgtgtggaaaaacccaatcgtagagtggccctgtggagttactgatagtccacgtctgtactgtggtagttctccataatgaaatggacttcagatccgaagatcctaatctactctttgctgtgaagagcacctgccttctggaagtgagaaatgacagcatcctgatgacaagacaggttcccatccctcagcaggtgcatcctgagcatctgtctgcctggggcttgaactgtgccgggtggcatgcaggaagcaaaagcatcctcggaaatgctccatcataaattgcatgacctcatgttggaatgagaggtggggtcacttccagcacttggaggttgaagcaatagttgctgcttatgcaagagaagaagtaagctgtaccagtgcctcccatacctcctcagggcactgccagcccagcacagccagctctcctctcttggcatcagctccctccgactgcacctgccctctcccaatccacagcagccacagcacccacggtgtgcctggcactgtgctaggtgcagtgggagtatggaacggaagccctggttcctgtcctcacggaacttgcagggaaatggactgtgaagctagcagtaacatactgcaagacgaaagaacgtgcacaagcagggtctgtggcagtgcctggtaaaggatgattgattctgtcccaaggtcccaagaggaggaggcagttgagctggctttgagagtgggtggggttctgacaagcgtgtatatgtaagagagagggaagcagacagagaggaagagaaacaactatccttgagaagacagagaaaatgtagtgatttgagggctattgtcatgaagtgatgagaggagcggaggtaagtgggttttgttttttgcaggttttatttttatttttatttttattttattttatttatttttttgacagagtctcgctctgtcgcccaggctggagtgctgtggtgcgatctcggctcactgcaagctccgcctcccgggttcatgccattctcccgcctcagcctcctgagtagctgggactacaggcaccccccaccacacctggctaattttttgtatttttagtagagacggggtttcaccatgttagccaggatggtctcgatctcctgacctcgtgatctgcccgccgcggcctcccaaagtgctgggattacaggcatgagccacccctcctggctgtgggttttatttttatatccttttttttttctttctttcttttttttttgaggtgaagtttcactctgtcacccaggctggagtgcagtggcacgatcacagctcactgcaacctccgcctcccgggttcaagtgattctcctgcctcagcctcccaaatagttgagattacaggcacgtgtcatgatgcccggctattttttgcattttcagtagggatggggttttgccatgttggtcaggctggtctcgaactcctgacctcaagtgatcccctggcttcagcctcccaaagtgctgggattacaggcgtgagccacagagtctcactctgccacccaggctggagtgtggtggtgtgatcacagctcccttcagccttgagctcctgggttcaagcaatcctcctgcctcagcctcctgagtagctgggaccacagacatgtgccaccacacctggctaatttttaaaacattatttctagagataggatctcactgtgttgcccaggctggtctcaaactcctgggctcaagccatcctcccgtctcggaccctcaaagtgcttggattatgggtgtgagccaccatacccggccaagtgggttttatgaacagggtgggtttgagctaggccctctgggcaggataagaaggtcttattttacgtttattttttacgtttatttagaatcaggcatcatctctcttttttttttttttttttttttgagatggaatttcgcttttgttgcccaggctggagtgcaatggtgcaatctcggctcaccgcaacctctgcctcctgggttcaagtaattctcctgcctcagcctcccaagtagctgggattacaggcatgagccaccacactccactaattttttgtatttttagtagagacagtgtttctccatgttggtcaggttggtctcgaactcctgacctcaggtgatctgcccgcctcggcctcccaaagtgctgggattacaggcgtgagccaccgcgcctgtagaaaaacatctcatcctataaaatagagtgaatctttccctaaatttatttttaacatacatacagcaaaatacactgtttttggtaagtagtagatgttgacaaatgcacagaatgtgttttaaccgccaccatcaaggtaaagactgttccatcccccaaacgattccatcatgcagtggccccttggaggtcatccctcccccttcccctcttggcatcccctggccacgctgatctgttcattcctataattttgcctttcaagaatgtctcacaaatggaatcatgcagttacgcagctctttgggtctttgcttctttcactcagcaaggtcatagctcactgcagccttgaccacccaggctcaagtgtccctcccacctcagcctcttgagtagtggagaccacaggcacacgccaccacgcccggctaatttttgtactttttgtagagatgaggtttcgccatgttgcctaggctggtcttgaactcctggctcaagcagtccacccgccttgcctcccacagttgtgggtgtgtgccaccatgcccagctgttgttctgagagttctttaatattctggatacaggttctttgtcaggacagtcagatctgtgatttacagatgtttggaggaaattaatttatggagaaaatcttcacaagatgatgggagtgaggaactctgaaagtgaggtgagagtttggtgtcctgagctgtggcctttctcacagtgcaagatgggaccaggaatgaggagtggggtacacctagagaatgacatgaaaaagaggagtcacggggccttccaagaagctctgttcctggcgtagagcatggttcagaatgagaggcacaggtgggaattttggtttgccaggcatccttcctgcctggcgggctgcaccaggtctgcggctaatggcctgctgggtcaggccgggctggccccatccagaaaaacaaatgttcacgtccagcctgcatttcaaccacttccatggccttgtttccaaaccggatgagcgtgccttctggaatgggaggcgcggtaactggcaggcctgcaggagtaaggtgctgggtgtgtggctggtgcaagacagaatcagtgggggtgagttttctgggtcagggtgggtcctctgggatggtaacctcagcctagggtctgagtgaaggcttccagctatttttttttcttttttcttttttctgagacggagtctcactctgtcgcccagaccggagtgtagtgtcacgatcttggctcactgcagcctctgtctcccaggttttcaaggtgccttagcctcccgagtagctggaattacaggcttgagccaccacgcctggctaatttttgtatttttagtagagatgggagtctcgccatgttggccaggttggtctcgaactgttgacctcaggtgatccacctgcctcggcctcccaaagtgctgggattacaggcgtgagccaccgtgcccggccagctttgagctgttaacagaatgtctgaaacatcataatcttccttcctatccctgaccaggcagggtggctctgggacagaagacttacatgaaaaatgaccaaggccaggatggatgccgcctcccacttcttgtccaagctcattctaaccccgcctgctcctatgtcctcagagccatggcccagtccagatgctcgagtcttcattcttcccccgggggtgcagatgcttttccggaggtgcttagggcgtagggctggagagtagggcagagctggagtcctactttcccggagctcctagtgccccactgcctccagcacgtcctgtggctccctgaggctctgggtcctggaaggcattcgctggtgtggagactccctcttctgcctggctcctccttctcccagggcagggcgtgcaccgaggccccaccccagatgcccgtgctgcttggacacctggtttgggctgaccctcgggttctgacagggtgggatcctcctgcctgtctttgagacagcagctgattgagggcaaacccacccccgaggctgaggaaacaagtgtgctggctttgacggaattccagggcaagtgcttctgctagtcactcccgggctaaatctattaatattttcagatctgcattttcctaggacacacctccttaaagtgaagccaactggtttggttgagtacttttgcctctcaagtactgtattttcataatttttgctttttgctttatttcacttttaaaattttgtatttatttattttttagtatccctgtcatggcaacttttgctttattctagaaccctgaagaaaggccccgaggagaaaaagtctctcaacccttaaaaaaaaaaaaaagactataattttgagtagtttggggtttatagaaaacttgagcagaaagtagacttcccgtagatacattcttgccccgcccccagtcagtttctcctagtcttaacatcttgcatttgttgcaattgatgtacatttgttgcaattaatgagtcaatatcggcacattattattattattattattattattattagagacggagtctcgctcttgttgcccaggctggggtgcaatggtgtgatctcggctcatggcaacctccgcctcccagattcaagcaattttcatgcctcagcctctcaagtagccgggattacaggcatgcgccaccacacccagctaattttgtatttttagtagagacagggtttccccatgttggtcaggctggtcttgaactcctcacctcaggtgatccgcccacctcggcctcccaaagtgctgggattacaggcgtgagccaccgcgcccagccagcacattattagagtccatagttcacattagggtcccttcttggtgttgtccactctgggttttggcacatgggtagtaatgtgtacccaccattacggtgtcatgcagaatagcatcaccgttccccaaatcctccaggttccgtttattcatccctccttcccacttctggcaaccattgatcttttgactgtctctgtagtttcgccttttctagaatgtcatatggttggaatcatacactatgtggccttttcagattggcgtctcactaagtaatacgcatttgagtttcctccttgtcttttcatagctcattttttttttttttgagacaaagtctcgctctgtcacccgggctggagtgcagtggcatgatcttggctcactgcaacttctgcctcctgggttcaagtgattctcctgcctcagcctcccgagtagctgggactacaggcacgtgccaccatgcccggctgatttttatatttttagtagacacaccattttgtgtttcaccaagacgccgggctggtcttgaattcctgacctcagatgatctgcccacctcggcctcccaaagtgctgggattacaggcgtgaacctccacgcctggccagctcatttctttttttttttttttttctgaatagtattacaccccgctcccctccccaaccttttgtttttgcaaatggaggcactgaggcccagagaggggaagtgactggctcaagaggcaccacgaacctgtggcaaagctgcgcttggaggctaatttgccttcctctgggtacctgtttccaggggcctctgggccgggcgctgttctggaactaaacctgtatcatcacagctttgtccagaggctgaggggaggccagggggcaaggcctctgttcaccacttgccttgacccacttcctgcatgtgttgggtggggcctgcagatacccacgcccctgacgcggaaggggttgggggtggggttcccagcttccacctccctgagagctgaggagatgggatgctgggtccaggcaagtactcgccaccccactgccgcccgggcctgggggctgggtgggaagagactgcttgggttgggcctgggctggggcctgcagcatttaggaatcttatctccctctgttgctctctgagctgcccctcccactggagactcctcccagctggcctgcatcccaggccatctccatttacttaatttacctcccctcttgctagcctgcaggcctcctgctccttcctctctgtcccgccctccatcatccctcgtgatgactacagggcaatgaccgtgaatcacgtgcgaggagcccctgtttgggccgggctctgtgctcctgtctcatggacatgatggaattcaatcctcacagccgttatttggggagattgagattgcactggtgcctcttcagtggttgggaggacactgaggattagagtagcttgctcaggactcccaggtccctgtgaggctgggccaggatctgagctcaggcgtcttgagtccagagcccaaacgctaaatctctgccccaggcgtctctctctctctttctctttctccccttcctgctctctctccccttcccccttcccttctttttcctctctcttttgaccagtcattgctcaaggggtccagctctctgacttttgttccaacatctccttagcctgggaaggattgtggggcctcccctcctctcacctgctccccgttccccatcctgtcctgaagccaggtgtgatgaaggcctcacaccaaaggatggccgggaaggtgctgccgtgcattgccttgcaggggctttacttgcttttctcaatcctcagtggctctgcaggcaggaatgctcatccccatttgacaggtgatgaaacagaagctttggggaggttcagtaagttgctgaacagctgtgcaacgtagctggtgagaggcaggtttcactcaggtcataggactctgaggcgtctttaacatgtcccggacttcacgtggcctttcccgagaacttgttgcatttcaggagaggaaggggcactgctcagcaagaggaaggcactccagtggtgggagctcaggccccgggacacctaggttttcttggtcttgttttctgagaagggcccttttttggcctccggcaggccctggcccttccgaaatcacaatgggatctgtttgtttctaactgagtacacagcctggcccggcccagcccaaccaaatccatttctctgctgggttctttccttctccaccaatccctttccttccatccctcgggactcacctgcctgtgacctggggactctcctgtccttctcttttcttttccagctgtaaccaggccctttcctttgctcctgtattttgggcccaggtcccctgcagtccctcttttccttctctgccctcttctttttgtcttctatctcctggtgtgctttaaacaatttttttggtgaaatgtatgtaacataaaatttgccatttgaactccaagtgtgcagttcggtggcattaaggacattcacaattgtgctgcagtctcctgcttccatctccagaactttttcatcttccgaaactgaaacgctgtacccgttaaacagtaagtgcctggtttttttttgtctttttgttttttttgttttgttttgttttgagagggagtctcacttcactcactttattgcccaggctggagtgcagtggtacgatcttggctcgctgcctccggggttcaagtgatttttgtgcctcagcctcctaagtagctgggactataggcctgcgccaccgcccctggctaatttttgtattttttagtagagacaggtttcaccatgttggccaggctggtctcgaactcctgacctcaggtgatccacctgcctcggcctcccagagtgctgggattacaggtgtgaaccactgcgcctgacaatgactgttaatgttatgaatgaaactccccattcccccatccccaacccctgatagtctctcttcggctgtctctatggatttgcatattctcagtacttcatggaagtgaaataacatgagatttgtcctttcatgactggcttgtttcacttagtgcaatgtccttaaggttcatccatgttgtagcctatgtcagaatttcatgccttttttgtttgtttgttttggagatggagtctcactctgttgcccaggctggagtgcagtagtgtgatctcagctcactgcaacctccgcctccctggttcaagcgattcttgtgcctcaacctcccaagtagctgggattacaggcgcctgccaccatgcccggctaatttttgtatttttagtagagacagggtttcacattgttggccaggctggtctcgagctcctgtcctcaagtgatccgcccgtctcggcctcctaaagtgctgggattacaggcgtgagccaccgcgcccggtctcattcctttctaaggccgaatcatcctccattacctggatgcaccacattttgtttatccattcctctattgatggacatttgggctgcttccccttttgactatcctggtgccttttgacattctgtgcttaggaacagtagacagcacttccgcactatgcttggggccactggaggcagcaaaaccacctgcaaaagtgcagaagtcatagcactaaatagacccagaacaagacacttgcaggagagccgacccaggtagacaaagtgcggcgttgccgacctcagctgggagcgtgcgcgtcaggcagtgagaatttgtggctgctcagtgcatgcatgtgtccgcaaatgactgtgaaaatactgggagtagtgatttgggggttagaaattttagcaagttggcaaacttgcaaatacaaaatctgtgactattctgtgattaatgaggattgactgtacttgcatcttcatagatgactctccctcattccctcctgagatgacagcgttaatccattcagcaaggcccaatcacatcttaaaggctccatctcccaacattcttgtgttggggattaagtttttaacccatgaactttgaggggcacattcataccagagcagcgcccaatgcctgtcatatagtacatgcccagtgaacagtgagtgaatgaagggcacaaggactgaagtacccgtgctgagttgttaggcatgagaatcagcagggagagatctttctggcaggggagcctgttcctctcctccctgggaacaagccctctcctgtgctcaccgagaggcatccagtgatggtcatggaggttggaattgtgtggcagaaaagtgcaggcctgagatgtagttctagtcccagttttaacaggttttgtggtctttggcaagtcacttcacctctcagggccttagtctcctcacttatacattggagggcagttttctcccccaagattctttcctcacacaaaccctgggaaccctgcctctctccgctgggatcttcactggaggctgtgggaacagtggggtccacgcaatgaaagagaccaagaggtcttcgtgtctgcagagatgaacttctctagctcccttagcctgccaatccaggctacccctccctccaactctgcacatctaacttgcatccctcgtgctgcagagtcagatcatcccccttcctattgccaacagaagtgtttgcaaaataggccggatgtggtggcttacgcctgtaatcccagcactttgggaggccgagacgggcggatcacttgaggacaggagctcgagaccagtctggccaacatggtgaaaccccacctctactaaaaaaacaaaaattagctgggcatggtggtacatgcctgtaattccagctactcaggaggctgaggcaggagaatctcttgaacctaggaggctgagattgcagtgagtccatatcgctccaccgtactccagcctgggtgacagagcaagactctgtctcaattaaaaaaaaaaaaagttggcaaaataggtcaaagaagcatcatggccaggcgcagtgactcacgcctgtaatcccagcagtttgggagggcaaggcgggcagatatctgaggtcaagagcgaaactccatctcaaaaaaaaagcagcatcatgatgggcaggaggcagcttgcagtggggaagggcttcagagccgcagtctgagccttgtctcttactggctttgggctgggacacagcacttcaccttaggagcctcagcatcttcacctgccaaatggggcagtgcagctacctcaaggggatgggggcaggattggaggaagatgtagtcaagtgctttgcccagtgcctgatgcagagtgggcatttgaaactggcacctcctagtgttaaagtagtaaaacgtgtgttcctcggtgtcctgggcacctctttgacactcagccctctcacaagtgctgggctgcctgtatccgtcctgcagggtcgcctgcccagtgcacaggggcttgcactgtgtgaggaggcagcacagcccacccggcactacctgcaggataggttctttcctgcccaggtcccctggcctcctccctttgtctcccagctcctgagtttccaagcttagttagcgtggaagacagcagacaactgactggccagagtagcacggcacattcaggcaatcagtgtagcagctcaggggcctctgggaactggggctcagggaacccttcagggtggagggggcctctcactgcactcgcttgtgccctgtacctacctccacccaagcctctgactctccatagcacttacctgtttgcatgtctgtctagtctcccatccccatctgaagtctgagccccatgagggtctggacccttttctctagagttaagtccaagaacaggtactttaagtaaagagttagttgatggactgttggcaggaattaaattagtactgaggcccaccctaagcagggaagcagtatgaacagacttggggctcaggagatggtgagaagcccaggggtgctggagggtagtggggatgcgcctggaagaaggctggggtctgctgctcctctttcccgtctcattttaagagatgatttctcttaaaatgaagagacttctccatttcttattttgagagatgaagcccagtgacccccaaaatcagggtgttttcttctgaattatctgtctcagctctagaggctggaggagttgtgaggggcttagggatcacagtggctgcagaaggctctgaaaggagggctctgggagcttgagatggatcggactggggagaggacgtcaggttggcctggggtctggttctgccttttctcggggcaggtcctttgccctccctgaggcttggcctctccatttggaacttagcatcctgattcccttcctgtcctgaaagtgttttgggaggagcttactgttctgagtattagggagatcttaataaaagcccatacattcctgatccttctggaaattcctgagtaattagcacctgtgggccctaggatggagcaacctgctgtcttctggggttgccctgggggctaccctgtagcttttggttggggctgaggcagagtagaggctcctgggctgggccctgagaaccaagtcagggattatttttactcttctgttcacagcgcatggcccagctccacgatgccatctgtcccccgcctccggctctcccctggcaggccctcctgggtcactgtggagcacttggggaaggaggaggaggctggtgctggcttaccccattccatgagccacagggcagggcggtgcgtgggaggtttgcctggtggcgggaggcagctgccagccccgggatgtgggccgcgggcagataggagaagctcgccagtgacggctgtgaacctagagcaccagggacacgtggggctgggagcaactccatttcggtaacaaaccctgtggcccagggccttggatgacctgctgccctgcttttcctgggacagacccaatcctagggacatggagtgcaggtcctcagaaaaccccactcgtggggcagggtctggcattaggagtctttggttctccccaggtgtgtgttctgctgggctgccctaggcccaacttctgcagggactgatggtgctcacttcaccaggccagtccagctcagcttgggtgaaggaaggggaattctgaggaggagcggggcccagagaccatagaaggggtcaggtggggtaagggaggtggcggccctcctttccatctcctgacatcctggtctccaccgcaccgtctacctgactcagggcatccatctgtacttagtgtcaggtccagaagaaaatctaggctacaaccaggacttaagaggcctcaggtattaaaatgattaattaagtattaatattaggcattagggcttcagactttctacttggcattgtttatggcttaataacaatgaagacaataagaaatagctcttatgagcactgactgtgtcaggccctacactagatgacatctcactatgtcatctctcctgcgggacagccttctgggatggatcagttccccagccttctgagcagagccacacgtgaaagtctgcaaggtacttctagaggccactggagacttctgggatctggggagggagtgtgaaccacagatactgctagcacagaaaggaccctggatcccaatgagggcatccttcttgttttacagatgagcaaaatgaggcccagaaaaatgaggtggtttgtctgtggttgtgtagttggtggtagaactggaaccaaagccaggctcttgcttcccatacatcacacttccattctacaagcctccaaaataagccccaaagggatttgtgcacaattcaagctctttttctggtatgccaaaatccagacatttcctgaggtttcttttgtttcccaaaactaagcacagagcaatctgttctccccacagagaaatcattattccacaataacacttaacaaatatgccttcgtttgttcattctgtgttcatcagctctgtgcagcgtgctgaggacttacagaggaagacagctgtccctgtccccatggtgtctaaagtgtggtggagaccagtccttactgggagatgggggctggatatggaaaggcaggaatctgctaaggttggagtcatcttcccagggggagtgacatacggctggatcttaaggctgagcaagggttggtccggtgaacaaggaatggaagggaagtttcaggtagcagcacctccaccaggagtggagaaagagcctagcatgttggagggtgatttggatggctgagtttggggcttggaggtgggttcaaagaaggtggtgcctgtgtgcggaaggtatggccggagagcagggatcagcagatgcaagcgctagaaaatcccatcatggagtgtgtagtgttatcttaagaacaaagaaaaggcattcaaaatttttaggtagcagaatcatgtgatcaggtttgcattttagaaaaatcactcaggctggggtgaagagattatggagcctgaatggggttgcacccgtcatccagatgtgcatcgctggaagcttggattagggctgtgagatagagtagattcaggagacatgtaggcgacagaaaggcaggatgtggtcattagttagatgtgggagatattaataagagggaaaagtccaaacagtcatgtgctgcttcacgaaggggatgcctcctgagaaatgtgtctcttggcgatttcatccttgtgcaaccataatagagcatccttacacaaacctagatggtatagcctacgacacacccgggctgtgtggtacaacctattgcttctgggctataaatctgtacagcatgtggctatactcagttctataggcaactataacacagtggtaactgtaactgttagtatttgtatatctcaacattcctaaacatagaaaaggtacagtgaaaataaaatataaaagataacaaatggcacacctgtatggggtacaccatgaatggagcttgcaggactggaagctgctctgggtgagtcagtgagtgaatggtgactgaatgtacgctactgtaggcttgactgtacactactctacactaggacattactgatactactgtagactttataaaaacagatacttaggctatactaaatgtatttaaaatgatttttcttcaagaatatattaacttggctttctgtaacttttttactttataaacttcttaattttttgattcttttataataacactttaaaacgcaaacacctcacgcctgtaatcccagcactttgggaggccgaggcgggcggatcacgaggtcaggaggtcgagaccatcctggctaacatggtgaaaccccgtctctactaaaaatacaaaaaaaactagccagtcgtggtgacaggcacctgtagtcccagctgctcaggaggctgaggcaggagaatggcatgagcccgggaggtggagcttgagtgagccgagtttgtgccactgcactgcagcctgggtgacagagcgagactctgtctcaaaaaaaaaaaaaaaaaaaaaaaaaaaacccaaaaacgcaaacacattgcacagctgttcaaaaatattttcttaatttatatctttattctttaagccttcttctgtgaaccaaatcttttttnnnnnnnnnnnnnnnnnnnnnnnnnnnnnnnnnnnnnnnnnnnnnnnnnnnnnnnnnnnnnnnnnnnnnnnnnnnnnnnnnnnnnnnnnnnnnnnnnnnnnnnnnnnnnnnnnnnnnnnnnnnnnnnnnnnnnnnnnnnnnnnnnnnnnnnnnnnnnnnnnnnnnnnnnnnnnnnnnnnnnnnnnnnnnnnnnnnnnnnnnnnnnnnnnnnnnnnnnnnnnnnnnnnnnnnnnnnnnnnnnnnnnnnnnnnnnnnnnnnnnnnnnnnnnnnnnnnnnntctaaaaaaaaaaaaaaaaaaaaaaaaaaaacccaaaaacgcaaacacattgcacagctgtacaaaaatattttcttaatttatatctttattctataagccttcttctgtttacaaaatctttttttttttttttttttttttttgagacggagtctcattctgtcccccaggctggagtgtagtggcacgatctcggctcactgcaacctccgcctcccgggtttaagcggttctcctgcctcagcctccctagtagctgggattataggtgcgcaccatcatgcctggctaatttttgtatttttagtagagacggggtttcagcatattggccagggtggcctcgagctcctgacctcgtgatccacctacttcacctgtttttttactttttaactttgtcgttaaaaacagagacataccagccgggcgtggtggctcacgcctgtaatcccagcactttgggaggccgaggtgggtggatcacgaggtcaggagttcaagaccagcctggccaacagggcgaaaccctgtctctactaaaaaaatacaaaaaattagccaggcatggcggcggttgcctgtaatcccagctacttgggaggctgaggcagagaattgcttgaacccgggaggcagaggttgcagtgagctgagatcgcgtcactgcactccagcctgggcaacaagagcaacactccatctcaaaaaaataaaaactaaaaaaaataataaaaacagagacaaacgcacacattaggcctgcacagcgtcagggtcgtcagtatcactgtcttccacctgcatgtcctgccccactggaaagcgtttggggcagtaactcgcatggagatatcatctcccagggtaacagtgtctttttctggaatgcctcccgaagggcctgcctgaggctgttttacagtaattttttttttacaagtagaaggagtacactctaaaatgatgataaaggctgggcgcggtggctcacgcctgcaatcccagtcctttgggaggttgagacgggccaatcaccagaggtcaggagttcgagaccagcctggccaacatggtgaaaccccgtctccactaaaaatacaaaaaattagccgggcgtggtggtatgtgcctgtaatcccagctactcgggaggccgagtcacgagaattgcttgacctcaggaagcagaaggtgcagtgagctgatactgcaccactgcactccagcctgggtgacagagtgagactctgtctcaaaaaataaaaaaaaaataaaaaaatagatataataaaaagagacgataaaaagtatagtatagtaaatagttaaccagtaacacagtcatttattgtcaaggattgtgtactgtacataattgtgtgtgctagacttacacaacaggaagcacagtaggtttgttttacaccagtgccaccagacacgtgaggaatgtgtggcactgccatggtaggatggctctgatatcactaggcaacaggaagttttcagctccattatcatcttatgggaccccctttgaatgaacgtttggggctgactgaaattttgttatgcagtgcatgaccgcgttcctagctttctggtctctgtgtggatagtggttcatttcctgagagagagccgaggaggtgaacaggatttggggacaagctgaacacttggttttgggcatgttgagtttgaggagctctggagattgattagagatgcctggtaggcagtttctgtgaggaccttcacctcaggaaagatacacagatttggggattaaaccaatatagtgggaatgcaagccttgggtggggatccccccaggagtctgtttagggtttaaaaagaagaggtcaggtcagaacccagggacacatctttatagaatgagtctggtgaaatatggagcccagggaatatggagaaaggaagcctggagccgacttggaagactggagactcctcctgctgcttctatgtgttttcagaatcagcttgtttttttgtttgtttggttggtttttttgtttttttgagacggagtctcactctttcacccaggtgggactgcagtggcgcgatctcannnnnnnnnngaggttttcttccttgctgggattctaggcgtgcgggtgagttgaacattgcgggaaatcaatagggcccaccagataagtgacagacgattatttagtaatttgcacagattttttgagatgttgtggctttgcaaacatttctttatgatgtggggactgatttgagaaggggtttaactgcataagcccgtacggataccacctgcgccatggctgctcaatgcgtgctcagcctgctgggtggacgccattattctgactcagcctccagaggcgctgggaatccgggcgccggacatcatgcccgggtccttttttggattttttggccctcggggtttcaccgtggtctcgatctcctgccctcgtgatccgccggcctcagcctcccaaagtgctgggattacaggcctgagccactgtgcccagcctggaatcagcttgttaagctttgtggaaaactgtgtggaattttttaaaatcacaatttcagggccgggcacggtggctcacacctgtaatcccagcactttgggaggctgaggaggaggatcacttgaggtcaggagttcaagaccagcctggccaacatggtgaaaccctgtctctactaaaaatataaaaattagccaggtgtgatggtggcacgtgcctgtaatcccagctacttgggaggctgaggcaggagaatcacttgagcctgggaggtggaggttgcagtgagctgagatcacgccactgtactccagcctgggtgacagaacaaaactccatctcaaaaaaataaaaataaaataaaaaatcacaatttcattgaatttatgatttatttggagagattcaacatcttcataatattgttttcccattcatgaacacagtttctctccatttatttaggtattatgacactgtgaaatacatactaggggtctggcgctgtggttcaggtctgtaatcccagcactttgggaggctgaggcgggtggatcacctgaggtcaggagttccagaccagcctagccaacatggcgaaaccccgtccctactaaaaatacaaatgcaaaaattagccgggtgaggtggcgggtgcctataatcccagctactcgggaggctgaggcaggagaatcgcttgaacctaggaggcagaggttgtagtgagccgagattgcgccactgcactccagcctgggcaaaaaaagctcaaaaaaaaaaaaaaagatatattgggacttcattcagtttcctgccatacaactcctaaaatccttgcaatcttcaaaacgatgtgtctttttgtatgctaatgagtcgatttagggcttgcagtccctaggtagcttcaggatgggaccagactccagaaagacaaagggcaggattagaggggtggaactttcagccacaccctccaacctcagggaggcgagaggggctgaaggtcaagttgatcaccagtggccaatggtttaatcagtcatgcctatgtaatgaagccaccatagacacctagaaggactgtgttcgaggagcttccagaaagctgaacaggtggagggacctgaagggtggcgtacccaggagagaacatggaagcttctcgaaccgtcccacgtgccttgccctatgcgtctctatcctttgtgagatcctttagaataagctggtaaaggtagatagtgtttctctgagttctgtgagctactgtggcaggttaattgatcttaaggagagggttctaggaaccccatctatagctggtgggtcagaagcacaggtaaaacaacccagggcatgggatgggcatgggaagtcgggaggcagtcctgtggaaccgagcccccaccctgtgggatctcctggcttcaagcaaccctcctgcctctcggcctcccaaagtgctgagattataggtatgagccaccatgcccagccctgtttttctcagtgaggctcttagattggtaaattctctattatttttgtctaaaaatgcctctatttaatcttcactcttgaatgattttttgtttgggttttaaattcaagattaacagatagtttcttttaacaatttggtgatgttatattgagtcttctagtgttactgttacgaagtttgctatcagtttgttgttattattgtttttgaaacagaatctccttctatcgcccaggctggagtgcaatggtgcaatatgggctcaccgcaacctctacctcctgggttcaagtgattctcatgcctcagcctcccaagtagctgggatgacaggcgcccaccaccacgcccagctaatttttgtatttttagtagagacaggggtctcactatgttgcccaggctggtctcaaactcctggcctcaagcgatccacctgccttggcctcccaaagtgctgggattacaggcatgacccatcacaccagaccaagaagttcaatatcagtttaatagtccttactttctagataatctgccctttttacctctccatgcttttaagatctctgttttgggtattctgcagtgtccctatgttatgtgttccttttatttgaatttatcctggttaggattcagcatggttcctgaattattggagtcatctcttctattaatctggaaaattgcctgctgttatctcttcaaatgttgctctactttatttattttctatgttctctttttctggaattctgatgttgaattgccttattctgttctccttgctctttactgtcatttaaaaaatacatctgggtaatttcctcagctctgtcttccagattgttacttctttatctagctttatctaagttgttaatcccaaccattgagtttttaatttcaatgactacaatgtttatttttaaatgtttgatgtagttctttttccagcctactttgtagttttgataatatcttgttctttcccatatttacaattccttatttaggtcaataatcatttaaacataatctcttcagagattttcagcctgggaccactgtttatttttaagaattggctagaagttactaagtgatataaaattcaaatttcaaatccattaaagggtaggcccttggttacaaattcttttttttaagaattattttttatatctacaatttaggctaagacagagaattttttttttttttttttttttgagatggagtctcttgcctaggctggagtgcagtggcgtgatctcagctcactgcaactctgcctcccaggtacaagtcattctcttgcttcagcctcccgagtggctgggattacaggcgtgtgccaccatgccaagctaatttgtgtatttttagtagagatgaggttttgccatgttggccagactggtcttgaacagctgacctcaagtgatccgtctgcctcggcctcccaaagtactgggattacaggcatgagtcgcttcgcctggcccagagaatcttcgctgtcatattttgtcagtgttctactggttctctgaggatttaggtatagttcccagtttcagcttctctgcatctctcaggtctaaggtctcatctctgagcagccattaaaacccgattgtggccgggcgccgtggcacatgcctgtcatcccagctctttgggaggctgaggcgggcgaatcacaaggtcaagagatcaagaccatcctggccaacatggtgaaaccccgtctctattaaaagtacagaaattagtggggcatagtggcgcacgcctgtagtcccagctacttgggaggctgaggcaggagaatcgcttgaacccgggaggcagagttgcagtgagctgnnnnnnnnnnnnnnnnnnnnnnnnnnnnnnnnnnnnnnnnnnnnnnnnnnnnnnnnnnnnnnnnnnnnnnnnnnnnnnnnnnnnnnnnnnnnnnnnnnnnnnnnnnnnnnnnnnnnnnnnnnnnnnnnnnnnnnnnnnnnnnnnnnnnnnnnnnnnnnnnnnnnnnnnnnnnnnnnnnnnnnnnnnnnnnnnnnnnnnnnnnnnnnnnnnnnnnnnnnnnnnnnnnnnnnnnnnnnnnnnnnnnnnnnnnnnnnnnnnnnnnnnnnnnnnnnnnnnnnnnnnnnnnnnnnnnnnnnnnnnnnnnnnnnnnnnnnnnnnnnnnnnnnnnnnnnnnnnnnnnnnnnnnnnnnnnnnnnnnnnnnnnnnnnnnnnnnnnnnnnnnncgtcctacttcttactgtaacaaagtggcccacgcatctgtattcccagttacttgggagggtgaggcaggagaatcgcttgaacccaggaggcagaggttgcagtgagttgggattgtgccactgcactccagcctggggacagagcgagactccatttcaaaaaaaaaaaaaaaaaaaaaaaaaacccagttgtggccgggcatggtggctcactccatgggaggccaaggagggagaactgcttgaggctggaagttcaagaccagcctaggcaacgtagtgagacctctacagtaaatacgtaatctctacagtaaataaataattagccgggcatggtggtgcgtgactagagtcccagctactcaggaggttgaggcaggaggatctcttgaacccatgagtttagtgctgtactaagctatgatcttgccagtgcacttcagcctgggcaacagagcaagaccctgtctctaaaaaataaaaaaatataaaaatttaagtgacgaaaaataaaaaaccagcttcctcattactaagggagctttgctcagtcgtttctaaatttatttatagagtgagagtttaaaatcatcttatctactatattgccagaaattaaagttgacaactcttttaagtagtttgttttgggctgggcatgatggctcacgcctgtgatttcagcactttgggaggccgaggtggatggatcacctgaggtcaggaatttgagaccagcctggccaacgtggcgaaaccccgtctctactaaaaatacaaaaatcagctgggtgtggtgatgtgtgcctgtaatcccagctactcagtaggctgaggtgggagaattgcttgaacttgggaggcggaggttacagtgagccgagactgcaccactgcccaccagcctgagtgaacgagcaagactccgtccccccacagaaaaaaaataagtttgttttggaagtatggaaaaatgttttcatgttcaggatagaatcaagaccagaatttctggtaagagaataagctagtttattcccgataaagcgactctgcccccaaactctcatgaaaacttactttaacagccacagagacaaccggcaacacttgttacactaaaaaggccagtgactctgaagggctgagaacaagaccttgatctgcaccttggcctcactgcacgacctggggcatgtccttagccctctgggcctcagtgcccttttcagcaagctgaaggagctgcttaggtttcctggtggcgggggttggggggggctttctgcttttttttttgaggcagagtctcgctctgtcgcccaggctggagtgtagtggcaccatcttggcccactgcaacctctgcctcccgggttcaagtgattctctggcctcggcctcctgagtagctgggattacaggcacccgccaccatgcccggctaatttttttatttttagtagaggcggggtttcgccatgttggccagggtggtctcgaactcctgacctcagatgatccacccgcctcggcctcccaaagtgctgggattacaggcgtgagccactgcgcccggccggttcctgctttacgtgtcagtggctctaacctctttcccactgcatgtctgtgccagctgctttgccaagctccttttgacctctcctcctgggatgtgcctcccacacttatgcccctcccttccctcgatcctcaccccctccctcacagtgcctctccgggaaggaaattgtccttctcacaggccatgggtgggagatgaggggtttgagggtatggaggggaatgataagcaaggaatgctctgggaggtcccacttcagaggatccgaggtggaagtggtcgaactcaggggtttagacccccagcctgggtttgggctgctgggctgcattgctcctcaaggctagtgggggagaagggacgggcaatgtgtgtgacggggtgaggtcctcctttacaagtggactcggtggctgggatggggagaagttgggggctctgggagggctgtgggaggtacgtggttcccagctggtactcataacccaaaaactgcctgaagattactggtatgtcctgctccttcacaaacccctgagaactatgtttggaagcttacagcttggatggttggagccaagaggtcactggatttgtctcatgttaggggaaggtggggttgtgaccatgagcctccagaggcaccagaaagtcaatcctgccgttgctccagtgtgtgaggagctgcccagactgtttcttttagaaagagcctgagttgggaagggaacaggagaatagtgacctacattatattgtatatgcatttttaaaaatttttcattgtggcaaaaaagaccacaaaatgtaccatcctaaccctcttgaagtatgcaggttggtagtgttaagtatattcacaatgctgcgcagcagatctccagaacgtcttcatcgtgcaaaaccgaaactctgtacctgtcaagtcacaactctgtatctttctcccaccagcccctggtaaccaccattctactctgtttctatttgtttgaccacttaagaaaattaaaaaaaaaaaatttttagtagagatgaagtcttgctaactcctggactcaaatgatcctcctgcctcagcctccctaagtgctgggattacaggtgtgagcctctgcaccctgccgactactttatttttattttattgtattcatttattttgagacagagccttgctctgtcacccaggctggagtgcagtggcgcaatcatggctcactgcagccttgacttcccaggcttaagtgattctctgccctcaccctccagagtagcggggattataggtgcgagccagcacacctggctaatttttttttaattaattttttgtagagatggggtctccctatattgcctagactggtctgaaactcctgggctcaagggatcctcctgcctcagcctcccaaagtgctgggggtataggcatgagccactgtgcctggcctaatgtgactgcttagatacctcgtcagcggaatcatgcagtgtttgggttgttttgtaactggcgtgtttcactcagcataatgtcctaaaggtccgtctgtgctgcagcacgtgtcccggttgccttcctttttaaagctcctatttcgctgtaggtatacaccacattttgttcatccattcatccattgatggacacttggtttgcttctaccttttgactcttgtgaataatgctgccgcgagcatgagtgtacacatatatctttgagaccctgctttcagtttgtttgggtatatacccagatattgggtcatatggtcttgctctgtcgcccaggctggagtgtagtggcgggatctcggctcactgcaacctctgcttctcggattcaagcgattctcctgcctgagcctcccgagtagctgggattacaggtgcccgccaccacacctggctaatttctgtatttttagtagaaacggggtttcaccatgttggccaggctggtctcgagttcctgacctcaagtgatctgcctgcctcagcctcccagagtgctgggattacaggcgtgagccacagcgcccggcctgtaccattttgcattcccaccaacagtacccaggattttgcatgctttttgcccagggtcgatttaatgtcagtgcatccccggcactgcatccctgtctcctacttttcagcccttgtctgggttccttgatatcagggagtgcctaggtcattgtgctcattcgacagatgggaagatgagctctccagaggggaagggacctgttcaagaccccaggcctgattctcacagatctttcacttcacgctttgcttcctgagcaactgattcgggctctggcactccccggagtgccttcatcccatggcccacgcagttcttccaccgctcaccggggctatggttcctgtccccgcaggtccaacgagcgctcctccaagcggagccttggagggcacggccggcaccattacctccaacgagtggagctctcccacctcccctgaggggagcaccgtctctgggggcagtcaggcactggacaagcccatcgacaatgacgcagagggcgtgtggagcccggacattgagcagagtttccaggaggccctcgccatctacccgccctgtggcaggcgcaaaatcatcctgtcggacgagggcaagatgtatggtaaggagcccgtcgggttcagccctgtacctgaggctgaggcaaggggccgacaccagaaccttggggttcctgccgggccacggaaggggatgaccacttggggctttgtcgggtggacactgctttcttccctcctgggctcccaagggatgggggcatctgaggagaagcctgtgagggggtgtggagggtggggcccctggcggtgagcagaggtgggagtgggaatcttggaaaaggcgaatctgggtggggtagaacatccccccagagcaggtggggagcaccccacaagctgtaccccagcaggtgcctgaccagcaggctgcccaccttggctgtgaaggatgctcactcatcccctctttccctcattcactcactcattcatgcaacaaacagatgccaagccttctgtgtgcctggtgtgggttagacgggtctagtcccagcctgtcatctggggtgagggtaatgtgagctcacagatacctgctctgcaaggcagcctggagagctcctaggagaggcagagtgctggagaccactcccctaggaaaggccccccccaacccagcagagggtcaccagaaacggcttgatctttgtgagtggctggggttgcagaacacaatggaaactgttcagcactgcatgggaaggaccaagcagttggcatggggccacgatgacttttggatggaagagggggcatctggaaaaatgaagcaggggctgggcatggtggctcactcaagcctgtgattctagcactttgggaggccaaggtgggaggatcacttgaggccagcagtttgaaaccagcctgggcaacaaagcgagacaccatctctagtaaaaataaaaaaaattacccgggtttggtggtgctagcctgtagtgccagctactggggaggctgaggcagaaggatctcttgaggccaagaggtcaaggctgcattgagccatgattgcactgttgcactcctgcctgggtgccagagtgaggccctgtctcaaaaaaaaaaaaaaaatgaagcaagaataaaaacggaatggctgttggaaggcccagatcaggcttctgttcctgttggaaagtcctcaggaatcctagctcaaaacagcggtcttggggcaggagtgagagccctgagtgggtctctaagtggctgaagtcagtgacaacggggccccttcctggcttccaacaggatggccccagaccatctgcccacccccacgggtttccattcatttctcccccacacccaacgctggtgccacccccaccattgttgcttggctcggcttccccagggtcgcccttgcttctgggttggccctccagactgtccctgctttgaccacttcttgctctgatggttgcttggctcggcttccccagggtcgcccttacttctgggtcggccctccagactgtccctgctttgaccacttcttgctctgatggttgcttattttttcctttttcttttctttctctctcttttttttttttgagatggagcaactcttgttgcccaggctagagtgcagtgggcgcaatctcagctcaatgctacctctgcctcctgggttcaagcgattctcccacctcagcctgccgagtaagcttggattacaggcatgtgccaccactcctggctaattttgtatttttagtagagacagggtttttccatgttggtcaggctggtcttgaactccagacctcaggtgatccgcccaccttggcctcccaaagtgatgggattacaggtgtgagccaccgcacccagcttttcttttcttttcttttgtttttgagacagagtcttgctctgtcgcccaggctggagtgcagtggagcaatctcggctcactgcagcctccgccccgtgggttaaagtgattcttctgcttcaccctcccaagtagttgggtctacaggcgtgcgccaccacgcccagctgattttacaggtgtgagccaccatgcccggccttgcatctgtatttctaaataaagtacttgaatgtgtttgtggcagttaagataaaatttgtctttagcagatcccaaataacagtggcttacataggggaaatttccttctctctcctataaatgtctggagggtaggtagtccagggaaggtgtggcagctctgctccatgaagctctcagggacccaggatgcttctgtcttgtggctcatgagcatgccttccattgtgaatgttcccttaaggcccaagcagctgcttcagctccaggagttacattgcagctagcagacaggagaatgggatgaagaagagtgacctggatacatttaaggaagacactgggaaactaacccctgaaatatttactggccagaactcctgtgaagtcccttccacttctacttgtgaagttttgcttcttacttttagcgcctggggaagcatcatgggggagacagctgtgtgtggagcacctgggggtgcctggtgtggtgttgggtgctttgcagaggttgttgccatttagccaggagggacgcagcctctggaaccccccaggctctttcctctgctttggtggaggaggggatgggtatagattgtagcttaggtgtgaaatgagaaagggcagggggagtgtagggaagggcaggtggcttggctggggagctgtggtgtatgtcctggacccttcacagggcaggtctgtgtgctttagaggcagaggtgggccggaaaatgtaagtgtgcatgaggcatccagcaaggggcaagggcggagggcgctgtgggtgtctgggagggccctgtggagacgccagaatgcactaaatcaacagacatttgtggaattgagcacccctggggaccaagggcttaagggctttgaggacttgctttttgggtgtgtgtgtgtgtgtgtgtgtgttaaaaaatacgtaacattttccattttaatcattatagtttttcagtttataatttgatggcattaaatatattcacattgatgtacagccattactaccacccatcgccagaaatatttcatttcaaagtgaaattctttaccttttaaacaataattacctattctcgccatcctccccgccctccagccctggcaactgccgttctgctttctgtctttatgggtctgactcctttagttacctcatataagtggaatcatacaacatttgcccttttgtgactggctaatttcacttaacacaaggtcctcaacgtttatctgtattgtaacctaggtcagagtttccttcctttttaaggctgagtaatattccattgtatagaccacattctgtttatctgttcatctgccgacagacatttgggtggatgcttagttttatttagttgttataggtagatgtttctgtccctgcttcacatataaggatactggggttaagagaccgtgaccaagcctggggaagcgccaggctgtggatctctggcaggactggggttggaattctgtttggcaggagggaagccactgactcagggaagcagactgaaaacggtttggcaaactgtcctggccatgttggcatctcggatgctgctcctcccctgtgctgagacccagggaggggcatgggatggggacgctcgggagggcctggaggaagagtgaggaggggcagaggtgctgcttcactgtgcttcataacacgtcagcgctcccagcatcctgggcatccgtgatctttcggtcctttcaagggtcccttcaaggagggaggaatggcacctctgcttgcagatgcagaaatggaaattcagggaagccaagagtttctcccagtctctcaagttggaagtggagagtggggctttaacccagttctcctgcctccgagcttggcgttcctctgtcagctgaatggccttgctcctccactgcctggccctggctccaggtgggtcaggccctgggcagggccctggaggctgtactgcaggctctgacaaccgcccagcccccacagcacctgtcctgcatgagaataggttctgctgggatccagacacccgctcaccccgtctcttcttaccagtcccgggggccgagccaaggcaggactgcgtggggactgatggagggctctcagcaggcagcgctgaccagcccggctgggagctatagatagctctgagctcacccgcagtgtgtgggatgggccctctgggaggcggaatgggaggccgagctgagagctgactcagacctcagctcaccatggctgctcccctcctgtcttctcatcttcccttgggggatctgcgcttcccatcctctgtgtaccccagccccattctgagcccccagctgcttccagcatccccagagctctggtctattctccccgctcacttccctgcatccaaaggccaccagcccctttccaaatgggccggcccggtggggtacggggtggggctaagaggatgattcccgacctggggacccgggccttagctgtttgaggacaggagttaggctgctccgagctccgcccacggcacatccagcataggacacgctgaccaaggccaggcagacatgcagatgacatgcaaagcagcacggcagattaacacctgctatttctgagctgagtctcccacgcttgttggctccggccctccccttgagcacctcttaccctcctgggccggctccccagcccggggtgcttgcctgctcctgctcacggccgctttcatttctgccctgtcactgtgtgaccctccccctggcacagccaacgctggccacgctgacctcctttggccaggctcacagtcggcctagcctagcgtgcaggtggtgggactcgaacaacttcttgcccccttctgcctgctccccgccttccccgctcctcacactcagtgctggccgggtgggctcgcgtcccgcctcctgctctctggagggctgtggctggctctggggttccctctgcattcatccctttctgcctcctatgcttctcaccttcctgaggttgctcttgactttcccgagtcttcctgcctcttttccctgcctctctctctgcttctcccctcctgtgtcccaggtgggccatcctattagcagcccgtcagttctgattaagtgaccaccccccactgggcaggctgggctgaggccgtgtggtctctgctctccacgacttcatggtctaatgagaggggcaggaaaaacttctctggacagttagccacccaagcagacactggggttgtccacagccgatattaaccagatttatcttgggagttttcctgaaggaagcagagctgagggtgagtgcttgtcttggtctgttttctgttgttgataacagaatacctgaaactgggtaatttataaagaaggagtttattccttacagttacagaggctgggaagtccaaggttgaggggctgcatctgtgagggccttcgtgctggaggggactctgcagagtcccgaggtggtgtaggcatcccgtggcgagggggccgagtgtgcttgttcaggccttttcttcctctgagacagcccccagtcccactcctgcgctctgttagcctattaatccctgagtggattaatccatcgtgaaggcagtgccctcagggccatatcactccttaaaggcccacctgtcaatactgccagatggggattacatttcaacatgaattttggaggggactaatattcaaaccatagcagtgctccaggcaagggggtggagagattgtgagcatcagcctagaggcgagacttcacatggtgggtttgggggaccctggtggaggatcagggcaaagcactgttgattcctcagactgtcagaggtgaagggattccctcgttttctggatgagtcacacagctaataagaggcagaaccgggaccagactcaggctgagtttgggactagatagagcacgtcgagggtcttttcacaaaggtgatgggacagaggtcacggagtctcacctgggctcctgcccccgcttcttcaccatggcctcatttgcaggattctctgctcctctttgctttgttgccctgtgggtttccagctgctcctatgctcctccctatggcctgcaaccctgacttcaggtgcctggaggcttgatgacgggagtgttcaaatctactctgtccctgagagctggcgtgaccttgggcaagttatttaacctccttgggcttcattttccttttgtaaagtggaggtcataatactactacctttgtgggaggtgttttggtttatttattttattgtgagaaaaatatacattacgtaaaattaaccatttaagccatttttatgtgtacaggtcagtggcattaagtacattcacctttttgtgcaaccatcatcaccatccatttccggaacttttccatcatctcaaatagaaattctgtacccattaaacaataattccccattcccctctgcccctatagccgctggtaacctgttctattttctgtctctatgatttgcctattctaggcatttcataaaggtggaatcaagccagccgcggtggctcacgcctgtaatcccagcactttgggaggccgaggcgggtgaatcaagaggtcaggagtttgagaccagcctggccaacatggtgaaaccctgtcactactaaaaatacaaaattacaaaattagctgggtgtggtggtgtgcatctgtaatcccagctacttcaggggctgaggcaggagaattgcttgaacccgggaggcggaggtttcagtgagccgagatcatgccactgcactccagcctgggcaacaaagcgagactctgtctcaaaaaaaaaaaaaagtggaatcaggccaggcgtggtggctcatgtggcttatgcctgtaatcctagcactttgggaggccaaggcaggcagatccctcgaggtcaggagttcgagaccagcctgaccaacacagtgaaacccgtctctactaaaaatacaaaattacaaaattagctgggtgtggtgcgcacctgtaattagctactcgggaggctgagccacgagaattgcttgaacctgagaggtggaggttgcagtgagctgagatcatgccactgcactccatcctggatgacagagtgagactccatctcaaaaaaaaaaaaaaatgtaatcatacatatttcctcttttatgtctggcttatttcagttggcataatgtccttaagcttcatccatgttgtagcgtgtgtcagaatttccgtcttttttaagactaggtaatgttccattgtatggagagactgcatcttgcttatctgttcacctgtggatagacatttgtattgcttctaccttttgactactatgactaatactgcagtgaacattggtgtacaggtatcttgagtccctggtttcagttcttgtgggattggaattgctagctcatgtggtaattttatgtttgagtttttgaggaaccaccaaactgttttccacagcagctgtatcagtttacattcccgccagcaatgaacaaaggttctgatttcgcatatcctcatcaacgcttgttattttccattttttggatcatagccatcctagtgggtgtgaagcgctatctcgtggtttttgatttgcatttccctgatgattagtgttgtggagcatctttccatgaggttattggaataagacattgccttctagtgttgtagtagggatgagagcacacagtaggtgccaaatgcacagcacaggggtgaggggaacacgtacctgccctcaaggaactcacagtgtggcgggggagcatgactaggacggacactgaggcaggaatgggcatgccctcttgggtggggagcagtgcaagcttcttggggcttcctggagctgtggccttgaagcctggctgatttcaccagaagcctcagagccctccagggacaatggtaggaacagctcaaatgtcaggcccaattgctgccttctcaggcttcagtcagaagttccttctccacaaatagcctcctcctccagccccaggtgtttatggcttcagttgatccctggatagctgcacccccccacacacacaccccggcccccgcttccaggccattggggattagggtggggcagcgaggatgggcccagcctcctctccctgagccccaacctacaggggtgcagtgtggcacttgctcactccaccagaggcctacagtgaaccaaagatgtccacacacacttccacccactcttgggtggggaggcttgtgccctcagctcctcagtccttttcaagtttgaaagctaatagcattcattataatagggcttcgttaacaatattaacagtaatcgctgaccttgctggccctctgctgagtggtgcgtgctttacttactccatgccatttaacagtttatggtctagtgggtgggctgccatggagagaggggactcagcacagaggaaatgagatacagaaatgacctagcccaggcaggattttgcagctggggtaacgttttcagcggtgctatgtggcggaggtggccggcagggtgtgtgtgaggctgggtgtggggctaggagaaagcggagattcctcgtggacgctgcatcaggaatgctccaccctcagcctttaggccaaggctcctgtttctccacgggcagccttcgcccctggtggggtggggccgtgggtgtgagctgggggctgtcggacacatgtgctctgacagatggacagatgggcccacagtctggcaggggcgtccttcccatccccacccaggcctgccctggggttggccgaggccacctgccacgttgcaatgcgcagctgcctgactggcctcctccttccccagcctgtgttctcagccaccagagggggaagcctgcggttatgcagctaggggcagagctgggacaaggacaaggacaagcccctcccaccgccaccacctcagctgggtgctttacaagtttctcactgccatggcccttctttgccggctgtcactgtggttcccacgctctacctgtaggccgacgctccctactcccttcccctcttgcccctgactctgggggccttctggtgtctacatgatccaggatacgctggctcccaccagctgtgggtaccactgtccatgactggtgggcaggacctcaggtccaagtagttggatctccctccaggaccttacctcatgcagagacttaggaatcggggggattgatccaaagggaaggagcagcatcgtcccttgcggaggaagctcagccctgttgggggagcatatcctggggggaaatggccagcatgtaatactctcgaagcactggggacagccttggaaaacataccttctcgtggtgcctgggacactagcaagccatgagactgtgaataagtcatttcccctctctgggcttccatttcatcatcatcaggctaaacaggacctctagagtcacgtggtccagccctgcttctgagagaagtgacctccaattccctgttcattcggagtggtaccatgcagtagccacagatgggcactggcaccagactacatggacccgaatctcagccacatgcttgcctgcgaccctgagaaaatttctcaaccttgctgtttccatgtccatagcgtcgatgaaccctgaggaaatttctcagccttgctgtttccctgtccgtagcgtggatgacagtaccaccctcatttagctgttgtgaggatcgaaagggtgaatgcagataaagctgtcacaggatacatatccgtatccgcacagatacttgtactgatgaggtatgcagcaagtgttcattgtcattaacattttcacaggagtgacaggccacggcagctccctctgtgtgtaaagcctggattagatgccagctggcctggaggcagggagatggctgcgttgacctctagagcacccctggtggcaggaaggaagctgcttgggtccccttggctcacacacccacagacaccccacacttcactccctcacggggggttctcaactgccggcatctcccctgaccagcacaacgaggctggagggtctgagatgagccaaaaagggagaggaggaggaagctccacagacagccagggaaaagcacaactttaacaaatacaaacctggaggacagtatgccaagtgaaatataccagacgcagaacctggaggacagtatgccaagtgaaatataccagacgcagaaggacaaatgccgagagggctcacttagaggtggaatctaaaacagtggagctcacagcagcagagagtagaatggtggttactggaggctggggtgggcgtgacggggagatgttggtcaaagaatatagtttcagttagatggggaaatgtttttggtttctagtttttgtttttccgttttgtttgtttgttttagacaaggtcttactctctctccctggcagaagtgcagtggtgtgatcacagctcactgcagcctcaatctcctggtgaccctcctgcctcagcttcctgagtagttgggactacaggcatgtgctaccacgcctggctaattttttatttttatttttattatttttatttatttatttattttttttttttttttgagacagagtctcgctctatcgcccaggctggagtgcaatggtgcaatctcggctcactgcaagctctgcctcctgggttcacgccattctcctgcctcagcctcccgagtagctgggactacaggcgcccgccaccatgcccggctatattttttttgtatttttagtagagacggggtttcactgtgttagccaagatggtctcaatctcctgacctcgtgatccacctgccttgcccacccaaagtgctggaattataggcgtgagccaccgcacccagacttatttttatttttttgtagagatggagtgggtttcactatgttgcccaggctgatcttgaattcctgggcttgggcgatcttcctgcctcaggctcccaaagtgctgggattataggtgtgagtcatgacgcccagtcaaggaggaatgtttttggagacctattgcccagcatggtgactgtagcgaataataacatattgcatttttcataagttgctaagaaagtaaatttcatgttctcatcatgaaaaatgataagtatttgaaatgatggatatgctaattatttgattcaatcattgcacgttatatacgtatatcataacatcactttgtaccccataaatacaggttgagcatcccaaatctgaaaattcaaaatctgaaatactccaaagttcgaaactttttgagatgtgcgccttgaaggagatgctcgttggaccgttttggatttcggattttaggattagggatgctcagctggcaagtatatagtgcagatagcccccaaatttgaaaaaaaccccaaatctggaacacttctggtttcaagcattttagataagggctagtcaaccagaatgtacagtttaaaaaaagaaagaaaagccaggcgtggtggctcacacctgtaatcccagcactttgggaggctgaggtgggcagatcacctgaggttgggagttcgagaccagcctgaccaacatggagaaaccttgtctctactaaaactacaaaattagctggacgttgcctgtaatcccaactacttgggaggctgaggcaggagaatcacttgaacctgggaggcggaggttgtggtgagccaaaatcgcgccatttcactccagcctaggcaacagagcgaaactccatctcaaaaaaatgaaaaataaaaataaacaaaaatagaagaaagaaaaaaaaaacaaagatgggccgggtgtggtggctgatgcctgtaatcccagcacttttggaggctgagatgggcagattacttgaggtcaggggttcgagaccagcctggccaacatggtaaaacctgtctctactaaaaataacaaaaattagccaggtgtgctggtgtgcgcctgtaatcccagctacttgggaggctgaggtgggagaatcactggaacccgggaggtggaggttgcggtaagccgagatcacaccaactgcactccagcctgggcgacagcgagactccctctcaaaacaaaacaaaacaaaacaaaaagaagacggctgagcttgccttagacccttggtgtggctcctgtcccgccccattactagcctctcgcccggggctgagacggcctttctagcagcagagccctggaaccttgtggcagagggtgagggtagttgtggggtggtgggcaggggctccttgcagaggctgagtcctctgtgatgtttggggttagggtctcagctgatgggggccaaggcctccctactgcttctcaccacaggctgcagaggaagcagcactgttacggggcagtcctgcctgatgagaggaggttccattaactaagcatccttgcttggccaggcctcgggccatattcaagcacctgagccaagagtcacacctgggcagttagtcctaggtctgctgtgggtgatctggtgcagttctctggcaaataggtataattacctgcccattgcagggaggaggtggatttactgtgaagttaatgaggtttacgcgttaggacccagcacttacatgggccccttccaagtccctaaacttaatttttgcttcattgaagtgtaactgacattacaacaaactgtacatgcttaaagtggccaagctgatacattttgacagatgtatgcacctgtgaagccatcaccaccatcaagataatgaatatgtccattgcccccaagtttttaacctaattttgtatttttaaaattctttttcccaaagggagcctcccaattgctaaatgtcttaggcctcacaaaagtctgggtttgctcatgtacagaaaagttcaatgagaccaggataggacacgccttaaaagttacgttggactaatcagaagtaaaaggttatttgcatgtatttaacttacccctttgtcttagaaggctaaaacagttacgggacatctgaccagcatcttagcattcattccctcatcattcaggcagcaagtatttattgagcgcctacaatgtgcaggcagttttctaggtggtgggtataaataagtgaataaatagaccaaaaatccctatttgcatggactgtggttctgacgggggtgagggcacagacagtactcaaataagttagattatgtattatgctagaaggtgctgtggagaaaagtaaaggcagtgggtgccagggtgggcgggtaggagtatgatttcaaccctcagtggggtggtcagggaagagacagtggcacccaaggggtgcaggtggtgtgggactctggggcagagtgttccctggaggagaaacaggaagcacaaggaccatagtggggcaggtgtgggcctggtgtgtttcaggacagcaagaagtttaggatggatcgggtagactagatcagagaggtgactgaactggggtggccagatcctgcaggggtttccaggccattgtaaggacttggacactgttaatctggggcagatggaagccattggagggcttttgaatttcgatagggtcgctgcagctgctgtgttgagcatggacttggagcagggaatacaggtggaaggtgatgatcctaatccaagtcagagatggcgggagcttggaccctgtagggtgcggtggtgcacagtggctgtatgaattctggatgtgttttggaggtagagccacaccagactcattcattcattcagtgagtaggtgccaggtactggagatgcagacttgaatggaggcatagtctcttcctctgagctgttgagagtctaacaaggaaagacagacacggataactgatgagcacacgatatcctgtgtgcaagggacaggccagaggagcaaccaagaaccgtatcccagatggtctgccatccccatccctcctgctacactgtcacccacttcgcagctcttgggaacctctcttcctccctcatgcttttccttgcccgtagactagtctctgagctgggttacttacttgggcctagagcatgttcattttacagaaaaggaaactgagccacagagtgttctcactgagccagcgttgaggtctatttcctatatctgtagaaatttggaagaatctgcgggaaaaaccttaaaggaactagatttaagaagagacggctgggctgggtgcagtggctcacgcctgtaatcccagcactttgggaggctgatgcgggtggatcacttgaggtcaggagttcgagaccagcctggccaacatggtgaaactctgcctctacttaaaatacaaaaaattagctgggcatggtggtacacacctgtaatcccagctacttgggaggctgaggcaggagaatcgcttgaacctgggaggcggaggttgcagtgagccgagatcgtgccattgcacgccagcctgggggacaagagcgaaacttcgtctaaaaaaaataaaataaaataaaaagataaaaaagaagagaaggctgagtgaaagtccttaaagggaagagacttaccgtgctcccaaagctcattggtggagctgccaggctctagcctggctcaccagctcccaggtctgtggccctacttcattcacccaccggtgatgacttagacccgagatgctgcatgggtggctttagttagacctggggtagaactgtcgaccgttcactggaccgccaaagcctttccctagaaagctttgagaggagacatcttgtggactcagggtttcaggtgcagatcagaccacagacagtgtccccagactccaattctcccccgactccttcctctgacacagacgaggcagtggtcccaggccagctcaccttttctggcagacctctggagagtagcctcttaattcggccttggcactggggaaaggtcagctcgggggtcagcttggccttggccgtgcactctggttacaacccaggtggcaggcagcccactcccctcacctccccgggcatcagcagctgcctcccacggacagccgcaagccctcccggttccgcagcacagggcgggctggcacctgctccctctgatccccccactcaaaccctcttgctctgcctctcctcatccgatgcttctccgtatggtctaacactagccaggggtgaagggccacccaagggcttgcctgaccacccagcctgaactggcccccggtcctctgaacacgtccctgtccgtagcaccggtggattccattgtgtgggcacatgctgctcctgaactaggtaatgctttgaaataaggaagccctttccatcatctttttcaatactggaaaccatggatgctctggggttttccaggttgcttcaggcactgcagcagtccctcgggggctgggcccatggggagtgctcaaccttccttgttgaggggtctgagtcagccatggggctgcacatgtgcactgactggcttttctttatgagcggacgggctcaggcctcctctccagggacactaagtgtctccagcagttgcacccccccatgcccgctgctgcctgcagacaggacaagaagtctggacgctcctactcatttacagaggcggagggcacggtggcagtcacacagggcaaggccgagggccgggcagctccctggagcctcccaagtgtgaagaaggcccaggagaaagtgtggggagaggagaggaggccgccagcgctgggtgaggaacggtgccgggggtcaagggaggctctggaagttcctcaggctgtgcgtgttggtggccacggaccctgctaaccttgttctcgggtttcagtccccacagtgaggccttgtcttcctctcgctgctgggagatccctgtgatccagagagggaacccacagaatcctcaccccacaaatccgcttaggatgggcagagagtgagggcagggctcctccgtagagggtaccccgcaccccctcactgcttccagccttttgtccttctgtccactgagaggctgctggtgtctccgcaggtcggaacgagctgattgcccgctacatcaagctccggacagggaagacccgcaccaggaagcaggtgggcctcaagagacgggtaggggtcccgggggtggtaccccagcaccagcctgctcccaaggtgggccaggccctcccaggaccagacgcaggcttttgaggggcggcagctctggatgagttatccctgttgggcgtgtcacgggtggtccagttttctttttcttttttttttctgagacggggtttcattcatgttacccagactggagtgcaatgacgtgatctcggctcaccgcaggatctcggctcctcctgggttcaagtgattctcctgcctcagcctaccgagtagctggggttatagtcacctgccacaatgcccggctaattttttgtatttttagtagagacggggtttcaccacattggccaggctggtctcgaattcctgacctcatgtaatccacccgccttggcctcccagagtggtgggattacaggcatgagccgccacacctggccgggtgatacagttttcttggggtccctgctgccatcacttaggaggaaacccctcgcctctctggagagtcatcagcccccatctcatccttctccaggacagtaggacagacagtaaaacattggcactacttttcttttttgttgttgttgagacagagtcctgctctgttgcccagggtggagtgcagtggcgcaatctcaactcactgcaacctccgcttcccgggttcaagcaattctcctacctcagccttctgagtagctgggattacaggaatgcgccaccacgcccagctaatttttgtatttttagtaaaaatggagtttcactatgttggcgaggctggtctcaaactcctgacctcaagtgatccacctgccttggcctcccagagtgttgggattacaggtgtgagccactgctccctgccggcactgcacttctgaaatattgctggcttctggattagctgggcaaggcaggactgaggccccaccagttgaccctttcattcattcattcatttggtccacagatgtgggttgagggctgtggagggcgagagtcaggaagccaggctggggaacacaggttgttgggaggtagagacaggagccctctctccctgccacaggtctccagccacatccaggtgctggctcgtcgcaaagctcgcgagatccaggccaagctaaaggtaaggaaactgcagtgggggtgctggagtggccaggagtggtggccagcagcatgtcttccctttggggtcagggcatcgctgctggtgtgcaagtcagtgtgcttctctctgttgaggagagccaggttgggcctgtaacctctctcccatccgcacaagagggccaagtgtgtggatgcctggctccccacaccctgggagctagaggccaggctcctgctgggatccccccttgctggctcctgcttagaggggctcacacggctcagagcagccggatcacccgccagccctcatttcttgagggcccctcagtgccctcgactagaacatgcgcagtggcaggggcatgggggggcgcctgctgtgggggtgggggtggcgtttatggtactgtgggagctggggaattccttcctgcttcctgtcctgtgggactgggggttccttcccttccctgggtcagccccatcttgcagggcctctgctgataggtgacggccctggggggcctgatgttgctggcattcccctcggggtagccctgctccccacaggagtcaggcctctgggaccctggaaccaggggcctttgggtgaacactgggagggagtgagctctccatcagggaggtgatgacgacagaggctgcacagccagttggtgggaagatctgacatttgaggcattaagtctagaccatttataaacatttttatttatttatttttagagacaggatctgtctctgtcacccacgctcagtgcagtgacgcagtcatagctcactgcagcctcgacctcataagctccaatcacactcccacctcagcctcctgagtatctgggaccacaggcaagtgccactgcacggccatttttttctatttttttatagagacgaggtctccctattttgcctgagtgggtcataaacccctgggctcaagagatcttcctgccttggcctctcaaagtgctgtaataataggcatgagccactgggcctcgcctgcaaacattttttttttttttaaaagcaatgtagccccttttctttttttcccccaacaaaatatcaccctgatgtgttaccagaggagccgttcttgtcaaagctcctctcctcccacgaatcctttcccaccccttggaacttgaactctagggacctcagaacccagtttaaaagctactgggaggccaggcgcagtggctcatgcctgtaagcactttgggaggccgaggtgggcagatcacttgaggtcaggagttcaagaccagcctggccaacatggtgaaaccctgtctctactaaaaatataaaaattagccaggtgtggtggcgcacacctgtaatcccagctactcgggaggctgaggcaggagaattgcttgaacctgggaagtggaggtcgcagtgggccaagatagtgccactgcactccagcctgggcaacagagtgagactccatctcaaaaaaggccactgggctagctgggcatgcacgcctataatcccagctacttggaggttgaggccaggagttggaggctgcggtgagctgtgattgcacctgtgactggccacttcagcctgggcaacattgtgagaccccatctctaaaaatattttttatattaaagaaaagccactgaattagatgaccttgaaagtcccatctggccctggcagttcatgatcctgacactggaatctcagaacgagtgggtgggaaccacagacctttctgcctcctaggaagccacaccccactgcccactcagttccattcctcctgccatcagcccagctgttccccgagccccacagctgtggcctggcacctcgctcctttttccctgggacagctgaccagccctcagctgttgctccctgcctctcagcctcagctcccacagccatggagcccagccctgctccctgtttcccctctttcatctgcctctgactcaccgggaccctgcagatgaccacggtgaacagacttcccactactgggtttagggcaatcccttgggggccggctgtgtggcccacatttgcttcagggaattgtacttgtccttgtccacaggttcagacctggggcccaaggacagccttcagtggatggctggacagacaccaaggggagccataaactccataaaatatgcaaattttcatgtatatgtgagttgccttggagagattgctgtgaggattttgtcatattctcaaaggatctagaacccaaagtgattaagctctgggttggacagtgatccagtagaaatccctgagtgagaggctgggtcctaggcctggatttgccccgtggccgtgagtgcttgggcagagtcactgggacctcctggtgctccagtttcctcatctgtaaagtgacaggcgagcaaggtgacatccaagttcccctcccggccccggttagtggctccgtggctccattgcccggctactgctgtcactccccatcaggtccttcccacttcctctgacccctgccccaccctgcccaggccgcagtttcctgagccccagccgtttgtttagatcgagtatccaggaaggcaggcactgagcagatgcagccccggcctcgtgatggagttgttaagtgccgaggtctgcgggctcgcaggggtgtgcctgccaagtccctcatgccctcctgcggggagaggttgggggctggcctgggcactttcctcctgaaaattccaagtgtcttgggaggagacacacacttagacttactagttagctccctctttggttatcagagacaacctctgagagcaaagtccaagtttggccccaaaaggacagtggggagggggccaggaggggccagggacaaacctcatctatttcactgctttgtccacattgacaatggcccactactcagaacagttccccactccccaccgccctctatggtgcatctcccccgaccccttggtttgcatggccccccgtgtgccagtctggtccaagctcacctggtcaccatcaccactctcagcaccctagtcacccaaattctcagagcctcagtttcttcatcttaatgatcctacgagtcctgtcagtctcacaggactcagtgaggttgtgttcttgaaaaccttccgtgggctgcctcatgccacatgggtgaaatggtcaccttgagaggatgagtggaagggcctgctgtgttctggcttcacacctgcacggcaccaggatggcgggggagcactgagcctccctgagcctccgggccgcggtgctgcccacctcatggagctgcgtgtggaccgcgtggaggcatccctgggaagagctggcgagctgcagggctcaccgttgcttctcaacttctgtttttagtttgtgttttagagactccactctgtcgcccaggctggagtgcagtagtgctgtcacagctcactgcagcctcgacctcctgggctgaggccatcctcctgcctcagcctcccaagtagttgggaggttctcaacctttgtatcacttaagggagatccaggtctaccaagttaattattattagttattcaataatggttttatctttgtcattaaaaaaaaattcatggctgggggtggtggctcatgcctataatcccagcactgggaggtcgaggcaggaggatcacatgaagccaggcgtttgaggccagcctgggctaatgagatgctgtctgaaaaaataataataatcataaagatatttatttatttatttagacagattcttgctccgttgcccaggctggagtgtagtggtataatctcagctcactgcagcccctgcttcccaggtttaagcaatcctcccacctcagctccttgagtagcttggcctgcaggcacacaccaccacacctggctaatttttgtattttttgtagagccagggtttcgccaagttgcccaggctggcctagaactcctgggctcaagcgatctaccaacctcagcctctccaggagctgggattacaggcatgaaccaccgcttctggccagatatcaaatttctaatcagagcccctgagttgactcagtcgagccatttagccccgataaagctgcagacagtgaataatacttgctgttccagcccgtgtgtgtgtggtcttattttggataatccctgctgggtacagtaacgcatgcccgtggtcccagctactcaggaggctgagatgggcggatcatttgagcccaggagtttgaggctgtagtgagccatgattgtgcagtactctagcctgtgcgacagagtgagaccctgtctctggaaaaaaaaaaaaaagaagaagaaaaagatacaatttccattaggcttcttgaaatagggaatgttgtgtcattggttttgaagacctttggaattcgggcactcaggatggaaaccactgccttacatgaatataacaaacgattactattgttacccgtgccatccaagtggctttccctgtgtgcttatttgttccgggcctattcagggtgaacccatcctctgaggtcctggaacctttggagggcagacagtgggtatttacattctgacacgtgaaagatgggtgagtcccaggtgcctgcagtgcccagggagatccttagggcaggactgaggcaggaggggccacaggagatggtctcttgcctccagacagcccgtgtggccagggatgatgttcctgtgcactcgaggagggatccagcagatattcatgcatcgttttcacaagacaggtgctgagctaggcacctgtggtagagaggtgagcaaggcatagaaggtggccccataattaataaaatgacagataatgtctctgtaagctctgatgaaagaagcagggcaagtatcatgcccctttgacagatgagaaaactgaccagagaaaccagctgactttctcagttgcaaaacaagttaatagcacggcacagacttaacacctggtcccccagctctggccactggcagcgagacagcttccctgacccgagggccagacctgcctggcctcagcctgactagtgaccctgctgaggtcctcccttgcaatgtctcccccaggaccaggcagctaaggacaaggccctgcagagcatggctgccatgtcgtctgcacagatcatctccgccacggccttccacagtagcatggccctcgcccggggccccggccgcccagcagtctcaggggtaagtgggctgccgagagctggaggccaggccagccctctcctcctccctcctccctgttcagaagagccagaagcattggccagcccagatttctctcacctgagtcctcttggccagggcagtcagggaaggagggaacaaggacccaagggccacacacgtcccggcttggctggtattgggacggctttcttggggtcctcggcaatgactccacagacttcacaagggggaagggggagcttccaggagctgaccacctggtagctctgccaagttggcctaatttacagatgaggaagctgaagccaagggggctgaactgaagcctgagaccagcatgtacctgggcagctcgtgccacacagcctcatttctgccctcctgccaggtggagagctggtgccccaaaaacaaacccctggtcagattttaactttcccagccatgaccatgttggccacactctcagaatgatccagaaaggccccttttcagagctgtctcctcacaggggctttcttggctccagggactaaatgagtcttcaaggcacctgcagcaccgccctaggcacgtggggaaggggcagtgccaggccacagcatttttcaaagtgcgtcccagagagcactagtccatctgcatgttaaacagataggacacagtggttctgtgagtaagtttgggacccttggcattaagtgggttcttggcactgggacttttctgagccttaggtctgcactgtgactctgcgggggttgccctgtgccgtgtggaccacacctgggtgcttttcccatggagcccctcatccacagggcctgagagtcccctgaaactcactctgggggtgctgctgtggcctgttagcattcactagctaggcgaggcctcgggctgcagcctctcctcccagtggaggccctgcccggtcccaaccccacccccacgccacagggccccgggtgcacctggggctgtgctgattccatgccttttgcctcctcagttttggcaaggagctttgccaggccaagccggaacgtcccatgagtgagtatggcctctggtttctcttgccagttgctccctgaactgaacttgaacccataaactcatgacattaagcctgggccccagggtgtgctggggccgctgctggggtcggcctttcaggatggctctgagctcagggattgggctctcctactgtcagccatcactgggctcatctgtgatgtccacaccctagggtggtatttgccaaaactccagtctgtccagggtataggcagggccagagttggggtcccccaggggaggaggctgggaagcagacctctggctggcctgggaggaggagagggaggggtggatttcttcatcagacacgctgtgtctgtggacccgccacgaaacccaggggagtcggcaggggcgggagtaggaggccaaggcccatcaggaccactgaaatccagaccaccaggacctaccacacagagaccactggacccagtgcagggatccggggcggcggcctgcccgaggctgacacctcccctcctgtctctcccgcagtgtgaagcctttctctcagcaaacctatgctgtccaaaatccgctgcctctgccaggtgggtggcgctgcgggccccctttctatcgcagccatgtggctcctgcctctgggcccaggcccccagcagccaaacgcctgcgtgtccctcttcgatgctgccccgtcatgcactctgaccacacgtcctagtccctggccacaccgcattccttgcccccagcatgcacacctcagccgtgtgccaagccccttcatgcccctcgggttgccttgctcctgtctcctcgaagctgtgctcagggcttgtggggcacgtgcagttccaagggcagtgcctgtgccctggcggctgccccacttggccggccttgttactgcagtgtgcctcacacacctggtcctgggagggccaaggggtgtctagctcaccagcctggggcccctcccaagaagagggacccttgtgggagaagacctggtggaggcagccagcggtgctgacaggagcccccaccccgccctctcactgacaggctctgctctgtcctcgcctctttctcaggaggggccctcaccacctcccactctgtaggacaagaccagctcctcactcttaaactgccctttctggtgtggagtctgcctgcccggccccttggctttccctgccaccaagagcagccctgctgccttctgccccccaggtcctgaaggctgctttctctcgttcacacatcaaaacaaagtcacagtgtcaggtcccgtccaccctctgtctcatgccagtcttctgtccacactgaccgtgtcttcactccaggcctgctggcttttgcctgcgttcctgcagcggcctcttcaccggctcgctgtctcgtctcacctcctctcgtcaccctgtcactcaccagagcttcagtctcacggtgttgcttccaggtttatggtgccttcctggccccctggtgccttcaggacacgatctaaactacagtaggactggagtaggttcatctgttagcaacgctggattgagaggctcttctgggccaggccctgttctgggagcgggggagacacatgtgatgcaaacaggaaacgtccctgtctctccgggatgatgccatattgtaatagcggattcatctggttatttccccgactggaacagaagttgcttgagggcaggaacttaacagtgcctgttctggaagcctctatgtcccgcagggccccagctgccctccagaatccagtcttgctcggcggttccatgcagagtgctgagtggcccgagttgtaccaggcgagcccctccccaccagggcagctccaggatgccctggcccaagcctggcactccctccaccacctctgataggaggtccatttagggagacaggtggtcccccaggcagcacgtgtctgtccgaggaggcctggggtccttgcagagggtgcgggcagggcgggtgtccgtgaccaggttccatgtgcctttctcactttctgcagggtttgagtctcctgcagggcctgccccatcgccctctgcgcccccggcacccccatggcagggccgcagcgtggccagctccaagctctggatgttggagttctctgccttcctggagcagcagcaggacccggacacggtaggtcctggcctctgcctgtccagctccctggtcaccccctctccctctgtttctgcttccggcagtcttgccccactccaggctggggcttaattcagttccctgttcctttccgatattcccttctgcccttccccccactcctcctttcctccttcacgtcacccctcttccctctttccctcctccctggcttcctttccgtgtcccagcgcccagtcagcgtcacgctcctccctccctgtcctgtgttcctcctcccctcctaacccaaccgacgcttagtccaaggttgctctggtcccagccccacccctacactgtcccagcctctctctggctctgagaagcgggcaggaagctgaggagtctcctgtgtctgctccatatcctatgggataccagcctgtccccttcggtgtccagtgtcctgggtgaccagcgtcacctgcagaggtcagagggggacctggaggaggccaaggtgacaggatgccagggcccttctcactctgacatcttcaaacttcttcttctttttttttttttttttccttgagacagagcctcactctgtcacccaggctgggagtgcagtggcatgatctcagcttactgcaacctccacttcctgagttcaagcaactctcccgccttagcctctggagtagctgggattacaggtgcctgccaccacacctggctaatttttgtatttttagtagagactgggtttcaccatgttgtccaggctggtcttgaactcctgacctccagtgatccacccacttcggcctcccaaagtgctgggatcacaggtgtgagccgccgcgcccggctcagacttctttttagctgaggaacccatgaaccaaatagacctttacttagaagtccaggatgtaaaacaaaaggagtagacttttaccatctccattttactcatggggaaactgtggcccagaaaggccaagcggcttgcaccaggtcacgtggtgggcgcgcagagccggggttgtctgtctgaccgtctggcctgtgctccgtctccctcagacccactctctccacagtacaacaagcacctgttcgtgcacattggccagtccagcccaagctacagcgacccctacctcgaagccgtggacatccgccaaatctatgacaaattcccggagaaaaagggtggactcaaggatctcttcgaacggggaccctccaatgccttttttcttgtgaagttctgggtaagcctgggataaacccttccttcctgccaccagcgtgtccgtggtagtgagaacggggcgagagtgcccagagtgtgcccttgccacggtagaaacttggggaggtggcaccagtgagaaggggagagtaagcccagcatggctgtgggatggtcggagctgagccgaggagcggggcggtgatcccagagagctggcctagtcgaacgaggccttgtctcacgggtggggatggcagctaagcccggctagcagtggagccctcaggaggtgaggaggtgtagttccagaaaaagacaaacgggaccctgcggggataagtgaagacatgactaggagcgcccttgtcacccaggtctttgaatgacaagtcctgcatgggtttccgggcctggagctggtccttcggtgctcgtgtccaaggcatgttgggctgaacagagcttggagaaggggagggaagtgttggatgggtcacccagctgactctgctccagggcgaggccaccccacaagaaacacccacccagcttctcagatagctcagcctgtagacttggcctctgctgccctcccacctcaccccgggcaggtattttgtgggtggaacctcctccattgaaacgtcttgtctgaggccgggaggtacagtagctgctctgggagcttagcttcctgggggcccagtgtgtgcagaaaaggggtgcgaggagagagtcagacaggtaagtgctaatgaagccagcggtgaggaagggcaggaaatcaggctctgtgactgaggcctcgaatattctcaggacacggactgaggcttgggcggctctgcccgcattcctcttccccactccccttcagctctcctcacgctcttttcaatgcctcttgtgcggagattcttaccctttatttactcccagaccactttcataatctgaaagctttacttttcctagaaagaggcatattcacaccaaagtttatatagatgttcagatggcttgccggctcccagtgagcagctcccagcctggctctcatccacagctgaacttgggggcaggctgtctccagaaggggcaagtgttggaactgagacctagggcccctgacctttaagacacttagcatttgcgctctgccagcggaatggaagttggaccctggcctgagggatgggcacatctattggcagagatgggaaaggctgttgcggcctgggagtgcatgagtagtaaaggcagaaggaggtgggctctggagtgaagttgaagccgtgggtaaagagggaataagaggagacaactgggaaagtgagttagattctggaaggtcttgatcatactaaagtttgagttttaacctgttctggaatgaaaaataagtagtattttattttacttggtcttctttttaaatcaatgcatgttcatggttaaaatgttaattaataccaggaggcttatttaacgaaagagaatgaagggccagttgcggtggctcatgcctgtaatcccacacctttgggaggntgannnnnncnnatnncnangncaggagttcaagaacagcttgaccaacatggtgaaaccctatctctacttaaaaaaaaaaaaaaaattagacaggcgtggtggcacacgcctgtaatcccacctactcaagaggctgaggcaggagtaatcacttgcacatgggaggnnnnnnnnnnnnnnnnnnnnnnnnnnnnnnnnnnnnnnnnnnnnnnnnnnnnnnnnnnnnnnnnnnnnnnnnnnnnnnnnnnnnnnnnnnnnnnnnnnnnnnnnnnnnnnnnnnnnnnnnnnnnnnnnnnnnnnnnnnnnnnnnnnnnnnnnnnnnnnnnnnnnnnnnnnnnnnnnnnnnnnnnnnnnnnnnnnnnnnnnnnnnnnnnnnnnnnnnnnnnnnnnnnnnnnnnnnnnnnnnnnnnnnnnnnnnnnnnnnnnnnnnnnnnnnnnnnnnnnnnnnnnnnnnnnnnnnnnnnnnnnnnnnnnnnnnnnnnnnnnnnnnnnnnnnnnnnnnnnnnnnnnnnnnnnnnnnnnnnnnnnnnnnnnnnnnnnnnnnnnnnnnnnnnnnnnnnnnnnnnnnnnnnnnnnnnnnnnnnnnnnnnnnnnnnnnnnnnnnnnnnnnnnnnnnnnnnnnnnnnnnnnnnnnnnnnnnnnnnnnnnnnnnnnnnnnnnnnnnnnnnnnnnnnnnnnnnnnnnnnnnnnnnnnnnnnnnnnnnnnnnnnnnnnnnnnnnnnnnnnnnnnnnnnnnnnnnnnnnnnnnnnnnnnnnnnnnnnnnnnnnnnnnnnnnnnnnnnnnnnnnnnnnnnnnnnnnnnnnnnnnnnnnnnnnnnnnnnnnnnnnnnnnnnnnnnnnnnnnnnnnnnnnnnnnnnnnnnnnnnnnnnnnnnnnnnnnnnnnnnnnnnnnnnnnnnnnnnnnnnnnnnnnnnnnnnnnnnnnnnnnnnnnnnnnnnnnnnnnnnnnnnnnnnnnnnnnnnnnnnnnnnnnnnnnnnnnnnnnnnnnnnnnnnnnnnnnnnnnnnnnnnnnnnnnnnnnnnnnnnnnnnnnnnnnnnnnnnnnnnnnnnnnnnnnnnnnnnnnnnnnnnnnnnnnnnnnnnnnnnnnnnnnnnnnnnnnnnnnnnnnnnnnnnnnnnnnnnnnnnnnnnnnnnnnnnnnnnnnnnnnnnnnnnnnnnnnnnnnnnnnnnnnnnnnnnnnnnnnnnnnnnnnnnnnnnnnnnnnnnnnnnnnnnnnnnnnnnnnnnnnnnnnnnnnnnnnnnnnnnnnnnnnnnnnnnnnnnnnnnnnnnnnnnnnnnnnnnnnnnnnnnnnnnnnnnnnnnnnnnnnnnnnnnnnnnnnnnncagcctggtcttgaactcctgacctcaggcgatctgcccacctcagcctcccagtgctgggattacaggtgtgagccactgcgcccggcctgaggatgttattctctaggcttgccctacagttgtcatcctgagcctcccctatattgatacaatttcctagctcttgcatttctctctttattggtataaccccttcattttgtgggaacacatcctctagtaccttctaagaaaagatgcgtggtacataaatgaccttgcttctttgaaatgtcattatttttattatatccttatacttgactgattggtattggtagtctgggtaaagaatctagatcatacatcattttccctagaaaatgatgacttttttttttctgagacagggtcttgtttcgagatggagtttcgctctgttgcctagtctggagtgcagtggcgcaatcttggcttattgcaacctccacctcccaggttcaagcaattctcatgcctcacccttgcaagtagctgggattacaggcgtgtgccaccaggcctggataatttttgtatttttaagagagatgggatttttcagtgttggccaggctggtcttgaactcctggtctcaagtgatcctcccgcctcggccttccaaagtgctgggattacaggtatgagctatcgtgcctggcctagaaatgattttcgaggatcattctttagtgcatttgtcattatcttctgacataaatagtctgatagcattctaattccctatcctttattatgtaacttttttttttcctctggaagttgtaatatttattctttctccctaatggccagtttcacattggtgagctttgggatatgtgttgttttacttccccgtcttgagccaggtacttggtaggcacttttaactgtgagatgagtctttcagttttaggaaatttactcgtattatttctttgataatttatttccctcttctgttttcttttccaggaatctctgttatgatgttggaaccctctatgatgtttaccatttctttattttcttggacttatcctctacgatttttaccatttattttcaatcttggtctgttttcttagcgatttccttaattttgtattctaactcttttctgaattagttaaggttgtgtccaagtgcatatcacacaaaccccaaagaaacagtggcataaatagtttttctttcacatcaaggaagtctggaggtaaagactgtccagcgctggcccagtgctcctgacatcatgagggacctggcttctctctatctgctgtcctcagtgtatgacttctgtactcagggtcatgactgctggagttccagccactgtagccatcttccaaccatcaaaagaagccagtttagctccctgtaaggggcctgctgggaagccccataattagttgtgtggctgcatcttgccgtaaggaaccagggaaaggtacttttttagttgggtaagttgctgttctgaataaaatcagagctgtaatactgtagaagaagctgcatacatccttttatggatgtatcttagttcagttgatgacattttgttttttctgggtagtttataaagtgtgcatcctacagttacgggtgaattagatgagtggaatacagcagcatctctgccacaccttctgttgaatatttaatttcggctctgacattttaattttccagagctccttcttgttctgtgattgcatcaagatgtttgatggatgtagtttttctcctctttttcttaaaggtatgaagtaagcgttatttcttaagttttctcctgctcctaaccctccccccacccacaccgagactaagtcttgctgtgttgcccaggttggagtgcagtggtgtgatctcggctcactgcaacctccgcctccctgttcaagcaattctcctgcctcagcctcccaagtagctgggattacaggtgcccgccaccacgcttggctaatttttgtatttttagtagagagaggggtttcgctatgttggccaggctggtctcgaactcctgacctcaagtgatcgatttacaggcgtgagccaccacacccagcttcctgctcctttctttgtctttgtttctttttaattccgtttttctgtttgttttggtccttgtctttccagctggagggttttctttggtgtctttagttcttagctgcctgtctgtatttttttaacagctttcttgcagtgtaattaacttaccttacagttcacctacttaaaacatacaggccacgcacagtggctcacatcttaatcccagcagtttgggaggccgaagcagacagattgcttgagctcaggagtttgagaccagcctgggcacatgacaaaaacctgtctccacaaaaataatacaaaaattagtcaggcgtgatggcatgtgccagtaacccctacactttgggaggacgaggcaggtggattgcctgactgcatgagttggggaccagcttggccaacacggcaaaaccccatctctcctaaaaataccaaaattagccgggcatggtggtgcgtgcctgtaatccaagctactcaggtggctgagatgggaagatcgcttgagcctgggaggcagaggttgtagtaagctgagatcacaccactgcactgcagcctgggtgacagagcaagatcccatctcaaaaaataaagtatacaattccgagtttttaagtatattcacaaagttatgcaaccatcaccacaatcaattttagaacattttcatcatcccgaaaataagccctgttccctttagctgtcactccccactcccaccccccagccctgtgcaataatctaccttctgtctttgaagctttgcctattctggacattttgtataaaagggtttgtggaggatgtggtcttttgtgactggcttcttgaacttggcatagtgttttcaaggttcagccatgttgtagcacgcacgttcctttttatggccaaatgcttccttgtacggagagtccacattgtttatccattcatcagttcatgggcatttgggttgtctcctcctcttggctgttaggagtagtgctactgtgaacattacgtaccagtgtttgtgtggacattcattttcatttccatatgcttacgtctggaattactgggtcatatggcaactctctttcactttctgaggcactcccaagagtcttccgaagtggctgcaccgttttctgttcctacctccagggtatgagggtatgaggatcctattttctccacatcctcaccaacacttgatattctctgattgtagccatcctagcaaatgtgaagtggtatctcattgtggtttttatctgcatttccctgatgactgatgatggtaagcatcttttcatgtgcttactggccattcgtatatcttctttgtagaaatgccaattcagaaatttaggtccattgccctttttttttttgagacagagtttctctgtcacctaggctggagtacagtggcgtaattttggctcactgcaacctctgcctcccaggttcaactgattctcgtacctcagccttctgagtagctggaattacaggcacgcaccaccatgcccagctcatttttgtatttttggtagaggcggggttttaccatgttgtccaggctggtcttgaactcctgagctcaagcgattcgcctgcctcaacctcccaaagtgctgggattacacgtttgagctgctgtccccaaccccattgcccatttttataataaatagggttattttttattattgaattatgagttcttagttctggatgaaagttccttatcagttacatgatttgtaattattatttcccattctgttgaatgtcttttcacattcttttttctttttttcttcagagacagggtcttgctgtgttttccaggctggagtgcactggcatgattattgctcactgcaaccttgaacttgggctcaagtggtcctcccgcctcaacttcttgagtagctgggactagaggcatgcactactacacctggccaattttttttttttttttttttttgagacggagtctcgctctgtcacccaggctagagtgcagtggcgcgatctcggctcactgcaagctccatctcctgggttcacgccattcttctgcctcagcctcccaagtagctgggacttcaggcgcccgccaccacgcccagntaatttttttgtatttttagtagagatggggtttcaccgtgttagccaggatggtctcgatctcctgacctcgtgatccacccgcctcggcctcccaaagtgctgggattacaggcgtgagccaccgcgcctggcccaagtttatatttttatttaaaatttttatagagggtgtcactatgttgcccaggctggtcttgaactcctggcctcaagtgatcctcctgcctcagccttccaaagtgctgggattacaggtgtgagccactgtgcctggctccttttcacattcctagtagtgtcctttgatgcacaaatgtttctagtgttgatgatgtccagtttatcaagttttccttttgttatttgttctggttatatttagtagtgactgggagctcttcgtgcaaggtagaacttgtcacctggtgggtttcgctttagggtgattgggcttggggagctagctgtttgattggggaaatcaataaatatatgtgtttactggacttttttttccccctgaggtgatttagtttctccagagacgattcatctaatttccctggaagggacatacttggtcacaagtgttctggtagttggatttaggtcgggggtaggggccctgaccatttctgatgctggttctcacaaactctcctttcttactccccctcttccctctctttgaataagccccggtccctagaacgaggctttcacggccctnnnnnnnnnnnnnnnnnnnnnnnnnnnnnnnnnnnnnnnnnnnnnnnnnnnnnnnnnnnnnnnnnnnnnnnnnnnnnnnnnnnnnnnnnnnnnnnnnnnnnnnnnnnnnnnnnnnnnnnnnnnnnnnnnnnnnnnnnnnnnnnnnnnnnnnnnnnnnnnnnnnnnnnnnnnnnnnnnnnnnnnnnnnnnnnnnnnnnnnnnnnnnnnnnnnnnnnnnnnnnnnnnnnnnnnnnnnnnnnnnnnnnnnnnnnnnnnnnnnnnnnnnnnnnnnnnnnnnnnnnnnnnnnngacgattctctaatttccctggaagggacatacttggtcacaagtgttctggtagtgggataaagggtcgggggtaggggccctgaccatttctgatgctggctttcacttaactctcctgttcttactccccctcttccctctcttttgaataagccccgtgtccctgagacccgatgccctcctgtttaatttctgaagatggtcaccctttggtcttctttaaaaagtttttttgtttgtgtgtgtgttttttaatttttaatttcatagagacagggtcttgctatgttgcccagactggtgttaaactcctgggcttaagccatcctcctgcctcagcctcccaaagtaatgggattatgggcgggagccaccacacccggctgaccctttgatcttctaccgatgcatgggaggggtgggcctgggggctggactgtccagtgtacagactttttgtcagttcctggggacaaatcctgttccctccagctccgagccacgcagctcagcttcttatctgtcacccctgaagatattggtaggttgtgactctttttgctttctctacctcgtggaatccagtctggtcctaatcagctttgagtctccaaagcttgcccagctctcttgtcagctggtctctttgttttctttatctttgtggtgctgcatattgtttaaagttacttgctgttgtccttctagctgggtctctggaaggggaaaaaataaacttgggtagtcagtctcccacctttagccaggtgtccaggatgatggggtgacctgtgtgccactttgaaggggtcggcagtcgctgtttggagtgctgggctgagaaggctctagcagggaggagtgctgggtggacggtcacggccacgtgtgtagccagggaaatatttgtcagcccttctccttaagcgatgaggagtcacttaaggttttcgaacagggcaggacgtggccagggttgtgcttagttggttaactccggcacccagactggaagcaggtgtgagactcctgcagtgaagaccaggcaagacgcatgcgcctcctgaggacctcggccgagaggctggcctcagggtgtggcgtgggaggcaggatgctgtccactttttctcaggaggggcttaaatcatctcccagtctcccttccagccccggttgtgggaattggaacctgtacagctggcagtggcgcttcccaaccctgctgtgagtctgagggggcccccagccccctggagaagccttcacccttgcttgagcactcaccgcccccggcctgtccaggctcagccctgactcagcggaaggagcttaggcgagctgatctgtggctctttcccggcatggctcaggaccctggggatacagttggggtcagaggggagacccagttggcagtggcaggaagcaatcatgggaacactgccttggagcgggaggtggcatgtccgggaccctcttgcactagctcctgcctttagctattggtgatattctgtgttcttctagccaccctccagatgaggaccatcctaggtctcttgtttcacaagtaggggaaactgaggcatggagtaagcagggcctggccctgagtcccccagccggggtgacctctgtcctgtgggcactcctgttggatacttgctgtgagatagatgggcccagatagactgagagagatgacagctgcactcttctcaccacgttacatacagtcacacgtctcgtcctcaccacagccaagactgtggataacctcatctgcagaggggaaactgaggtacagacaggtaaaatcacctgccaaaggttgcccagttcatagtaccagacccataccagaccacggatccatacctgagcagcctgaccccagggtgtgtgcttggagccaccatactaaacagtcctccttgcgaagtcgctggctgccctccatgcagcgtcctggagcttctcctgctcccactggagaaggctctgaattgtctaaaacagatccccagccccctgaggaacagcaggcagtggtagcgtggggagagcagacttagctctgtgcagtcagtgtagagccagccccttaggcttcttgtgcgttctcgacctcagatatcccttccagaaaatagggcagtggccctgcatggagactaaggttgccagggaggaaggaggacctagaaggtacttttccaaacttggtagtggcctgtgtcctctctttctttctgactcttaggggagtttggaggtgggggttgatgggagaagagagggttgggacagctggtgccaaggacatgggatccggcaggttcccttgtggaccgtgtgctccggccgtgtgctgtacggacccagcgcggccctcggcttccaggagcccgcactctggataggaggatccagcacgagtctcagggtcctgggacaggagccgctggacagggggctgtggtgtgcccaccagcaaggcccttctgaatgtgtcatggcagggcacggtgggcagcagttggccccagctggggcagagtctcagttctaccacttgagaactgtgtcctgggcaaatattggcttctctgtgcctctgcttctttgtgtgaattgtcagcagtttgatcttggggacctgccaggggctgtgtcgctgaagaccccgtgtgtgtggccgcctggtactgagtggggggctgtggcctgcccttgccccaccccttgcctgagccctctgagtgccagcggcctgggcaggatgaggacgggtgaaatcagagatgagggagcgccggaggccagggcaccttggcggtcatctgctccctcctccgcatgtgtggggcgggcagaggcaccagaggaagacacatatgtgacggggaaaggtacatattcgtgtttgctgacaacgagactttgcgtcaatcgtgggtcctcacaggctgccccggctccccctgcatcgggaagctcctgtcttctgctccctggcctggtcccgccttccccctccatcagctggtgtgaacttggccacacacaattaggaaggaaaactgctcaggcaaggaaacggtgtcgcctctcccggagcctttcttttcctgcctggctgttttctcagtcctggctcccaggccctgaatgtgcgtgctggagaggcaatcagaacccccttggagtgggaggaggacttgtccgtccccagtccagcctccctgcctgccccctgagttactgctcttactgagggcgctgtggtggtcattcatagactctcggactgctgggacacatttccagctagaagtagcatctgccagcctgaagggctgaggctgctagggctgtgcacagcctcagccctatctgatgagcgccacggggcctggagcaagggactgatgtgatgaagcccccttcctcccccagagccccgcaagtccagcagaggccacctgtctctggggccggtgagagggggcctttggtcactggtggccattaacgccgctctgcacattggaaatgccaggcagagccgggctgcaccgtggaggcagcagagtaccccaggccttcctcccatctcagcctgctgttccctttcaggccctgacatttctcccaggcacataccagcacatgacaatgaatctgagcccctccaggcccccacacccgggctgcggctgtctctgctcatctgtcagtcacccgatcccccacacctgttccaggcacagctgcccacccgcacgcacagctatgaatagggcggagggagggttgcaagggggcactcacaggccaggggaccggggcagctctcaatttttcttaggccaagaagcgtagcttgtttggggtgggtgctcagtgtggggggatatgagggtggacaggaaatgtcaggagtatagctgcaggagaaggggtgaggctgtaattagaaggatccaggcactgaggaccagtcgaggtgctctggggcgggtcgtccgcgtcgccggctggtgtgttccgggtttatgcagtgtgaacatgagttctggggctgattgtgggatctctctttctccccctgacccattgctcaaccctagcacttgtattctatttgttctcccgattataaattccctgagagcagaaacaatgtctcaacctctctgggcccccctgcctctagcactgctggcctgggctggataaatgggcacctgagcgatgggaagagccagggagtgggagctgatgacagaagagtgtatttgagatgggggtggagctggggcgcaaaactctcagggtgagcaggacagggtaggttcctgcttgcgactgagggaccttgctcttctcactggtgccacccggaggtgagagggtgaacagccgcctgcaaccttgattgaaggcccaccctactaaggccctgggagagcttagttcttgcctccagggagcatcgtatctggaagggggcaaggacatctggacagattataacaagcagggtaacagagggggatctgccaattgctcctgggggctgggggcagctgctgcctctgtgtgtctggaagagcttggaggtgtggatgccagtccttcccagcttggcacataggatacttgtaaggtggcacatggatatgcattttttttaatagttaagtagttgcccaggctcaatggctcattcttgtaatccctccactttgggaagctgaggcaggaggatcacttgagcccaggagttcgagaccagcctgggcagcatggcgaagccctatccctgtgttttaaaataactttatttgaaaatatgaaaaatagttataggccagacgcggtggctcacgcctataatcccaacactttgggaggccgaggcaggtggatcgcttgaggccaggagtttgtgaccagcctggccgacatggtgaaaccccatctctactaaaaaaaaaaaaatacaaaaactagccgagcgtggtggtgggcacctgtaatctcagctactcaggaggctgaggcagaagaatcacttgaacccgggaggcgaaggttgcagtgagctgagattgcaccaccacactccagcccaggcgacagagcgagattccgtctcaaaaaataaaattaaaaaaatagttatatagttattttcatatatattagaaagaatagaatccttgatttcatggatttattgcttagaacggaattaaggaataaaagtgagttgatttaaaagaatcaggatgtgtcgtagatggcacatgaatgtggcattgatcagaggggccatgcacggttaaagtctgagggtcaccaccattgatgcctggcctcatctcttggtgttccccaccatgtccagtgcatccttcccaggcagctgggcttcctgccagcggcatttcaggcattgttcacatttctgccctgtgcttccagctacagcataagtcctgagcacacaaactgtcccccagcccctttttaggaacagtctgacaaagtcagtctcctaggaggagcaggtgacttcgagaaaataggagacaggccaggtgcagtggttcacacctgcaatcccaacactttgggaggccaaggtgagaggatcacttgaggtcaagagtttgagaccagcctaggcaacagcgagaccctgcctctacaaaaaatttaaagattagccaggtgtggtggcacatgcctataatcctagctactcaggaggctgaggggggaagactgcttgaatccaggagttcgaggctgcagtgagccgtgatcataccactgtactccagcctgagtgacagagcaagattctgtctttaacaaaaaaaaaaaaagaagaagaagaaaacaggagcccgaaagcctgggttctggtcccattcaccttatatttgcctgtaagaccttcggccagtcacagccacagttaaatctagtccggcagaggcctcagccacctctgccatgcccccctgggcaccctgcctacaatgtgtcatcccctcccccccggcatcacagatggagacagagtggggagactgaggccagctcaggggtggtagtggagggtgcttaggataaatgctgctgtctgtttcagaggctgagcattgacacgaatgctttttttccctaatggcctcatcaaagccgaggcaggtgcactgaaccatatgccattctgtttcagcatgaaaacagcctttttttcctcatcataaacgtaatccaccctcattctgctccgtagcctgctttcccactcagtgtgtttgtagtcatccatgataataaatgcaggtccttctcagcgttttttgtggctacataatgtttctattgtgctatagacaatcaacaccccccgccagtctagagaaaggtcgtgctctgggaaaacttctccaaaggagagaaaaataacgattgagtgtcccctcatggccagtagtagaattgcttggtgcctggctctgaatctggccaaaaccttctggggttctagggatccccttatctttgcacggaagagtccttggtgtcagaaccttgaccaaggcctgacgctttactgcattcgtagggctgcgctctgggcacagcttgcagtgatttcagaccggggtgtgggtgggaggagcggcctcccctgagaataagcctttgtaatgtgcctgtgcgttgtttctgagtcttgacttgttctcttagcacccctggctcagatggggtgatttgatgtggggctggagttctgggcatggggacccctaaggcgtagggcttcaggaatacaattcctgcctcagagtccccgaagcaccaaattgtctcatctggtgccttcctttcttcgctgtggcgctctgctggtttgggacaagtattggggttggaggctgaagacctggggtctttcacttaccagctggatggtgttgggcaaggctaacagtcaggacccctcatggataaagccgaggccgtggttttgggtgtgagatcggcacagagtcttactccgccttttctagaagggaagtttcagatcagccccacatccagcaggaggctccctgggctctgttttcatcaggggaaggaagagcagcctgtctgaggcaaggtgagaagctgacctagagcaccagtggctgggcctgtgaagggccttgtgagccaggccggggaccaagactcctgtcccttgtggctaaatggctcagtgagacggtgcagtgacttgtcttctgaagagactcccagggcagttaagagaatgaaccaaagggagggacagctggtgctggggagattgctctggaggctgaagcagagatgtcaaaagatccaagatgacgggacccagcagtgcctagagagggaagaggccagccccagagccgtttctgagggagcatcgatcaggtctctggcgagacaagaggatgagacaggagcagccttcaccccttccaccctccccactgccggtctcttgccctggttttctgttctcatgcttcctgcactatcaaaattgactctggaataattctgatagacgcattcaaactaaaatagagctgactggtagagattcaaacctttgcagtttaacaagaacaaagtcttagactatgaaacttgaagtcttaaagatggaatctggggctcccacctgctgggtgtgttaatatcggggcaggcagcagtggcctgaaactgtgtgggtcccagtgtcctcttttcccatgatttaggcaacacgacctgattttgtaccaggcagagatgtagaggaatgtggaagctttctggcgtcctactgtctaccctcagtctgatttcttcccagccctagagccgggaccgggaccctgaggtctccttgatgctcccgtctgacatggcacctgctgacactccctcgccttccccctgtctccctccaggcagacctcaacaccaacatcgaggatgaaggcagctccttctatggggtctccagccagtacgagagccccgagaacatgatcatcacctgctccacgaaggtctgttctttcggcaagcaggtggtggagaaagttgaggtaggaggccaccctggcgggtgagggccggtggcagtggtctgtgtttgctgggcgtggcttccatttgctttcaggaggaaagccctccgttagggagccaggacaatcccttgttgccttccctgtctgctgtcagtgctgtgtgcctcccacactccccttggcacgagtgtcctgcccaactcaccagagccattgctgccctttcaggatcttccaagcacgtccttgcaggcacccccggtcctctccaagggcagagccgcagcacaggcagggccctgggcatctacctagtccagccctctggcttcacagcggaggccccgagagagcggaggcctcccaccaatcgcctgcacgtggtcacacagctcactagtgcagaagcagggctaagatctctgtcccctgctcactttgaactccatgaatgcctaaaactgttccttccctgattttctacttatgggtaccctggagaccctgctgtaatggaagttacagaaaattcaggcctgccttttacggtttctcccactctgctaaacccccggccaagggcagtgcagggcagtggtgaggagcataagctcaggtgaatccccacccagccaccctgctttccggtgcgtgtctggggggttgtgataaaatcctctgtattttggccctaaacaagggccaagttatcttcactgtccgggacacggtctcctgcagcaccctgtgttctgggcccgctgcatagtggcagtgacaaggagctgggactgaaggcctccaacccaaagcacctgtggactctgagagtccgcggccctgtgccgcccacacgcttgttaaacctcctcaccgtgcaggccagtcttcgtccctctcctcaccccgtccccagattggtctgaattaatgaagtcctactctcacagtctgtcagttattgatagccttcctcatgccaaatgcagccagatgcccggccagcaccagggaggagacattcccccacacagtgcttctccgcctggctgcaccttacagtctcctgggagctttggaaacacaccagtgcctgaaacccattcatcacccctcagtctctagggtagagtccaggcattagtggtttttgaagagttcctcaaattacttatttctaattaaacttgtaaaacttttgagataatggtggatccacttgggctcataatcccatgtgcgctttacccagctcttgccctggccatatcttgcataactagagtgtaaagtggacaaccaggaaattgacgttgatgcagtccaccaagctggttcagatttcaccagttttataggcactcctatgtgcgcttgcatgcgtgtgtgtagacagggaaatttgcatgatcaccaccagactcccaggggtccctgtgtgcccctcatggtgtcctcatgtacagccaggattgagaggctcctaccactgctcctgtgtctccttaagctcccctcctgccatccccggttcctgctggtcacccatggagaaaggaggtcttgtttaatgtccaccaacctaagagggtgactttctttttttctttttgtgagacagtctcactctgttgcccaggctggaatgcagtggtacgatctcagctcactgcaacctccgcctcccgggttcaagcgattctcctgcctcagcctccagagtagctgggagtacaggcacgcgccaccgtgcctggctaatttttgtattttaatagtaacaaggtttcaccatgttggccaggctggtcttgaactcctgacctcaggtgatccgcctgtcttggcctcccaaagtgttgggattacaggtgtgagccactgcccctggctgggggtgactcttttcttaagggcccccaggctttctgcctttccttcccgtggagttgggtctgggctggaggtgggcagaatgggattctaagcccctgctgtccccgggtcctgcagacagagtatgctcgctatgagaatggacactactcttaccgcatccaccggtccccgctctgtgagtacatgatcaacttcatccacaagctcaagcacctccctgagaagtacatgatgaacagcgtgctggagaacttcaccatcctgcaggtgtgcggcgggtgctgcgggtgtggctggagtctgtgtgtgggtagcagccatggcgtgccccatctggggccctattaacccttgtctttttctctcccacaggtggtcaccaacagagacacacaggagaccttgctgtgcattgcctatgtctttgaggtgtcagccagtgagcacggggctcagcaccatatctacaggctggtgaaagaatgagagactcggggagcagggaggggggaagagacgtgtgtgcaggaaacggggacgtggggaggggacctgcaggggcagccccctgaagtgccaagagagctgagaggagcagttgtgactctacccaggaacaaactgtgcctgaacctgaggtgcccaaccccaaataaacccaagatgctgtgtattttcaga

SEQ ID NO: 73 - DNA, 83078 bp, Human
gctgggagctcagagggagctgggagacacggctcacaacgtctccctcccacccggctgagaacagcctggaatccctgtgcagagtttgcctcacaccaggccttgagcagccgcagggacgccgctccccaccgcgggtgagtcccctcctggccctcctggtgacccctctgccgtgggaggctgggatgctgggggaatggaaggcttggggagtctccttgctcaccacaatctccagctgtggggagagggaggtgggggaggggaggggaaggcttccccagcgtggggccgaggcggaggctgtggagaggctttgaggcctttgcggacaggaaggaaggatgaggctctgtgaaggccaggccgcagacgccgggcttccttcccactttctttctgtgtccctccttcttccactgaggtggcattttagtttctctatttcccgattcagcttcccactccaacaactggaaatggagaggggtgcctggtgtctcaggaaaaacctaaataaatacatacacaccagaaatcaaatggatctgaccaggtatcccaggaccatctggcctctgcttcctccagaacacccaaatcccctggggtcccccgcagcccttggtgtcctcttaagaacgcccttggaaacttcaggcaaacctggcccatgtcagacccagcccactttgcttttggggtcagaaagtctgtgctgtttcccatcgcttggcttcattagttagtagctaggtctcagagctctcagagtcggatacttttctttgcctattcgcagatcaagggtcagccaggcttggtatagggtttaatttccgattattctggagccagacctgagatgggaaggaggcgtgggggtgggttttgcaggtggaccacagagctcgtagttttcttccccaggcccactgcgtgcgttgcagagcttggtggctaatgcttttggttgcacacgcttttgcatacaagtcgaaattacctctacttcctacaaagccaaagtctgggcaaatgagccttaaatctgatttgtagctgagaaaagggctgagtcaaaataataataataataataataataataataataataataataataaataggagtgacagctttgagaaggagtgcagctttgagaaggcacgggtcagtgtcataaccaaggctctgagagtttgaaacctaccaagtttcctgtgcctagtccacatgctcgcaggttgaaagcagacaacaccatttgttcactctgtagcctcaggaggacccagcaagcgctcttctggaattgggtaggattgagggcaaagcctctcagtcctggtgtacctattacaaatattagctttgtgaagcagagaacagaaaattgttccctttgactatctttccatctccagcagccccaccggcttccagggggtgatttgaaaagctgtcacaaaacttacaatcatctgcattgcttatctttcccctgcccaactctctggcttgcttacccttgctaatgttttcccagggctgatattcctgctcttctgtacgctgtccaaaaataagggaaattgaaagggttttagtgggaaaagcagggacgggccaatctgagttaagggaaagccgtattatgtaaggtggctagaatcctgtgatttatcatcacaaaattggattggctttttaagtagtagtagcagtagttgttgtagtatttgtagtactagcaaatgttttgtttctgctggtctcattttgataaatcggtctacagtaaaggatacttgaaagtcccactttatgaactattttttttcagagttcatttttagtgacataatcattgccacaaatttcctttttcttctaagaatttgtctctgaaagtgattttgcattctcaagttcgattaggggggagccttaaaaacaattttgtgtgcttagtattgaggaagtgtttataaattactctttctccctggtctagtctcaagtataataaaatatccatttcaaatagctttctaatgtcttgttatatttgccaagtgatttataggacagaaaattatagtttgcgtgtgtaaagttcagagatattttagagcttggagcagaggagaggagaggttttagggttaaattcaagccatcaatctccaattgtctaaacactacacgaagtggagattcgaggcaattatccgaataattgcgggggggggcactttcgcctgaattatctagataaaagagcgacacaggagaatgtcagtggccctgaaggccctgcctcggatctccacggtcgcgcgaattcgggcaatttttctgaaggttctcagactcggggatgggggaggaaggggacgtttctagaagaaacttaaagggggctcgcgccgcacgactgtaggtggagggcgtgcgccgcgggacgccccagccgggtctgataaagccccgaagccgatctaaggtcaataaaccaggcggcgtcaggcttgggccgagggccgggaggagaggagagtggagccctctcaggctggcggcggaatgaaaaggaaccccgactgctggggtccgagccctgggccgcttgcggggcgcgcagccggggagaggagctgggcgcgcggcctgggccccccacctgcccgaccccagggcagccaagcacccgcggccttaaaagtatcccggcgagccctgagtgggccgggtgctgggcgaacagtcctagccctgcactgaggttggaaaagcgaacggaaagtgacatttttacaggggcgaggttgggatcgggagggagatggagacccccgaataatggaaacgcagaagcctcagagacaccagcaacagatagagaagtgtccctaagaggggaaaatgaggaagagggtaacagtattgttaactggccatgaattttaatccctgttgtgtgtcgccgaatagtttacaaactctttttgcactggggttttgtttctcccactccccgcatgatgagaagaaagaaagattgggagaagttaatcagctcaaagtcacatcgccggggtctcctgccagggggcttggaccagttgctaaaggacttcccgccggagaaggtcttcccaagagagattcccacccagagcgcgcagcccgcggggaaaacataacgcgcgcctgtaaatgacgccgctcccacctaggccgctctggggccgcttaacgtccggaatgtcccgacccccggctcaatctttggtgcaaagcctgagtgggcaggcgggagaccaggcggtgccggtggagcaggctacttcagcagcgcgaggctcggaagatccccgcggacaggcgcgacaacgggccctggagccggggaatctctgcaagtaactaaccaggcccctcggattcattgccactttcccgccctcggcccacgaggctgaggagctccctctcatcgcctctccgttcctggcaaggccgaagccggtttgctttggatgcatttcgatcaatctggcgccacatgggccaggtcacctcggacgggtgtcgcgccgacgtccttcgtggtcgcacgctggtgggccaggaagcccaggctatgcccagccgggtccgagcggcggtcggtggcgtgacctcttgccacgcctggcgctgctgggaacgtgtctcgggtcgccctttgcgtcagagaccccccccttggggagaccggaatcctccagccgctgcgcacggataccctgggcggcgaggagagcccggcttctgcgcacccctctccagatgcgaggtgctcacccgcccctcgccctgctcaccccgacgcctcggtccccacgctctgggcagcaagacacatagcgaagcccctgacccatttcttctcagttgcgaccccctgtgtgagacccctaaagaggccaaggatcacagtaggtgtttcatcaaaatggtcactgtgtcccccaggttaggctgctggtatctcaatatccccctgcagagagaccccgcacccccgaatcccataccccaggctgcaaagcacagatctaatgccttccttctctggccggatttggagggacattgaggggcatgggtggcgccccaggctcgcagggttcgtggtccggaaaaccgagcccagggaatctccagctccgttctgttcgcagaaccttcgggggttagtcacaggccctggcccgcgcgggatctggaggcagagatttctcgacgtttggggacttacagctcgtctgggagcgactggattcccaggcctccgcacgctgaggttccggggaagagcactgtcttcaccacttctcgacctgcgccccaacccatcaaatttccagcactcgtccccctaggtctcataaaaactcctggcagacccttccgggatcacgcgtggctcaactcgggggccgtagctacgatccccgcgcagacgccggaatccggggcccggtccccgcgcggggtgcggcgctcgcggggggggggggggggatggggtcggtccctctcgggaacggctgctgttgtttctttagatactgaatataatttctccctcctccaccccactcgctgttcttaacaattttatttattggtttactattgtcttgtgaacgtttcttgtctcctccttgccttttttcatcccctttctctcttcatttctctctttttccttaattctgttgcaaagtttccttttcttgcttaatcaaaattctccccgcttactttgttctttgcccacagcattcgttcttcttttctccttgcctgcctgtcttctttcccgctgttcttggccgtgggcagacccggctgatgtaaggactgcagcttttccctggcatactctgcgccttcagatgtggtctgcgtctgcctgggtctcttcccacctcaatctgagatccttgcccctcacaataaattcgtttttattcattctgatgtttgtctacagaagttactcgataaagatgttttgtttcatgaatcaaaaggcttcttgtctgtgaattattttaatttctggatattaaactgcacagtagctattttatttgcctttaataaatttcttaggtttttacctctaactaatggcacattttaaataattttccaagcactaggtggtgtctgacaagattgattcactcaaaaacgatgcagaatttcttaaatgtagaatcttttaaaacggtgtcggatggcttctcctgctacatcgtttatttgtagcttccactaactctaaagattgaacaggaaactgatatggtagaaatagataactttgccttgttcactagctaagattttatttgctttctgttagatcacagtagtgctatcataataatgatagaacaattcgtcttttttgtagataaataatgatttcgagtgcttattatttgttttaggtagaatttgttgttagatcatacatgagaattttatttcatagaatagtgctgatagatagtagatgcttttcatttccaacaaaacagagacaagattttgcttgtaagaagtttttttcccttcaagaaacttaaagaaagctttaactcttaaaaaaaaattctaacaaaactttccttgaagaaacaaaatttttaacggggaaaaacttgaccatgagaaattcagaaggaagatgtgaaagtcagctatgtctcctctgcaatgattgcagaacaacaaaaatttggaaagttactatcctactggtcagacgtagtagtccccgtttgtgcaaaaacacctcttggccgtggcgatgtggggagggagtgtggtccaatagtccttctcacttctcagaggttgacacagaatctaacagttaccctcttagaactactccggagaattcggtaggtagtagctagtttccacaccggggacctgctttgttaaatgctatgggtgtggggacaagatactgggttcagagaaagttctgggaagagtcttgaggtggaaacagcctcggtgcgcgggggtttctcgacagctctctggtgtctcttaccccctaggttttcccagccttctcgccggattgccttggaaagctcttggtgtggtggccactggggtttgctccagcagagataatggaggggctcgctatctaatctggacagcagcaggaacaatccattagacctcagcatttatccggagcgggggaggacggagggacggggctggcgtgctccacctggccctgggaggcgcagagctgccccacaggtggcagggggattaatcagagagttttgtgctaaatcaaaactcaccactgcgtattatgcttgctgatgccggtaaatagtaattctacccattgtgactgttaggaagtagcagaatccttttgggttggaggtatcgttttttttcttttaagaagttcaatgagctttacattgtctcattcaaactcacccatcaaggggcgcggttcgattccaactttcaccgtattccttgagactaggtagactaaatccatccccccattctttcattcattcattcggcaaacatttaccaagctttcctctgcgctgggcgttatgccttgtactgacaggttaaattatttgcccaagatgaggactaaagccggagactggggcgggaccctaaatcaactatttcagtcccgcaactgctcacttgtttgccccaagacacacaaatcggagatgtttggcgttggaagggccccagaggttatctagccagccttccattcagtgcaggaatccctccccacaatgcctgggccaggcccctacctgtactctctgccagctcaggaaactacagctcccgggtgggcttcccatttgaaactggctctgtgaacgggaaagaatttccctgggagaaaatggtcttagcctgcccacacctaaacttggactgctgagcccttaatgctactgtgactcccaagtctccgggtttatgccccaaaagtaagagttcccctgcccagggcaacccatgtcctcagccataactggctggccacgacctgggctgtgccatggctcccttcagccttgccctggtgatggagatccctgagctgctagaaactaaagcccctgaaacctgaagacgctgtgggccttagtcaagccaaccttcctctgatgttatggtggatatttgctgccaggtgagagaaaacactacagggagtagccaaagaattgccagagcctagattctagattctagttcccacacaaacacctacaagctgggtgaccttgagtaagttatttcacttctatttctagcatagtctaaaaataaggtgcaggaatgtgcttctcaaaagttgaaaatgacatctttttcaaagataaaatttctccttatagtctgtgttcacaaaagccaatttctgaaccataaactcattacaaagaatgttctggaaaccttttagatttgtttagatcctaaatgtacatcgtccctaggtcagtgtaagagtttagactccagtattagaatgttgtgatttgaattccatctcctccactcactggctgtgttttcttggtcaaattacttaacgcttctgtgtttcagtttcttatattttaaaatctttataaaccttagaggacggaaagactgccctaatccctgacataatcatgtgttcagctggatgctaatgttctccttgtttttgtttggctttgtgtgttttgtttcttaacctattacttcaaaactcttcagaaattaaatacatctactgagaggtagaaatttatctgacacactgataaatatgttttttatttagcttagccaaaattgactgctgctggtggttgtggaaattgtgtgagttaacctttccgaaaggcaatttggcaatagatattcaaaacccaaaaagtggtcatattctttgacccactttttctggtaatagaaatttaccctcaggaaataatcagagattcacaagatgctttacttagcaaagtttataatttgacaaggacgcaccaaacattatgaattgaggtgaaaaacagaaaataacctaaactctaaacaataagagtttacttacatgaactatactaaatccattacacgatcattaaattatgttttcttaagatattcaatgacatgggaagtctcgattcttaagaaagaaaaagtagattgtgaaacacttctaccacagtcgagaaagagaagagagaagactaatgtttccaattctttctgcctaatgtggctaaggatggatttggttgtccccgttatacttttctgtatttccaaatggactatgacaaactcgtgtttatttgaaagcagaataaacaaatattttgagagaggtgaggaagattggccagatccaagacatgtcagccttcttcaggcttcctacgatgtttatgactggtgcgctttcgtagcaaatcatttgttccagagaattcagttttagggtccccaaaactcaatggactcaaaactccaagaacagccctggactcctgattccaggctagagatgttcacagttggtaggagtgatttttccacaaggaagagattcccctccccatttagaaaatgttttcaggtccaaattttctcagaatttcacttgcaaccttgagtgtttctgaaattgaaaacaatcatctaagttcttgtaacttttccctcttccacgactcccttttctggcaggaggatgtggtgggatgtgaggccaggtgtggggtagtgatgggggatgctgcaaatagaagctgattattcagacctcagggagggagaaaaggaggagacttggtggggaggaaagtcagagctttgttggtggccaagaagccaggtgttcagaaaggaaggccgtttgaaggcaagagagccaaagcggaggacaggactgcagactgaatgaatcacaagacagctcttaataaatgtcaggttccggttttgaaactgaaatagtttgcacttgtagagaaacaagtagcagatgccttcctcctgctttacaagaagggtgtgggatggagctgggggagagtggtcacaaaagcaagtagaagtgagatcccaccataaacttaggagaccttcaaaagatcttgtactgggtctgtttttttttttttaatcttaatgtagcacatcccagtcaacagaagataaaagtaacatcgagataaagaccaatttcacttttattaattagcaaataaatagcaaataaattgcattctgaatatagcatgaaatataaacttaaaataccatttaataatggtattttctttctctaagtcctacatttaaaaaaaatttttgaggttggccttcgttggttgggtgggtgtgtttgttgataatggagtgtgaatagaatttttgcaaatcacagaattttctgaagactggaggcagctcctcctaagctcatctcttcccttcttcatctacaaggcaagcaaggccgagacaggcaccatagccatcttcatgtaattttccagccccctacactgcacaggcatagtggtaggaactttcctgaaggatgattcttgcaggggtgagttccagacacccttgttgacttaattctctacaaacaaaatcctcaggctgggcgcagtagctcatgcctctaatcccagcactttgggaggccgaggcggtcagatcacgaggtcaggagttcgagaccagcctgaccaacatgatgaaaccccgtttctactaaaaatacaaaaattacctgggcatggtggggcgcgcctgtaatcccagctactcaggaggctgaggcaggaaaaccacttgaacccgggaggcggaggttgcagtgaagcgagattgcgccattgcactccggcctgggtgacagagtgagaatccgtttcaaaaaaaaaaaaaaaatcctcaaccacagttgtttaatctgccccttttctaggaaggggattaactccaaagcctgagcagacatctgtgttcttgatgtgcagaggatgccttccaaagcaagagatgtgagaagtgaggaggacacagctgggagggaagagatttcccttgcctttgaaaaacgcttcattctctgctagctaggcattctgggatgggtgggtcagtatgttgttgactgcttttcttatcgctgtaccatttagcatccccagaaatggctcctcaggcacagttttttttaggcatccatagaccaccctccccccgcagagaattatccagagaagtatccaaggtgctccatctttgtacagttttgtaataatctccacctgtaatcaaaatagaatccgggaggtcaagcaatcctcctcttggccctgcttcaaactgctgaaccaaacagagctctgtgccctcatctgtgagttgggggcaatgaataattgttgtggtttatcaaagtggtatcacatacatcacatttgaacctcacagcaactctctggtgtattattagaccatttccccctttttatagatgagaaaactgagattcagagatgttgtaaagccaaaggtcacagtactaataagtaacagaattgaactcaaaatgccttgctctaactaccaagtgctgcctccctcaccctccagagaaaagccaagaatacaggagattgtctacatgagctgatatgtaatggctctgacaggttttattgggatcccttactcatccaaaaatcaaaaaattacacagctacaaggctcctagaactgatcaagccctgcccccgtttcatttggcaggtgttgcccaatgaggttgagtgatttgccaaaggtcactccatgagttcatggaaaatgaccaatgtcatttttaaaaattagttaaaagtaccttctaccaagcccatttttatggcttattttaagcaggttaataagtataccaggcacagcttaaacccaactgagtaaatgctgacaccagtttatagattcagcagataagtagcaataaggaattattcatctctcatttatcatccagcctttccaaggtgcaagttataaagtgaagcaaatagcagttcaagagccccccacacacgtgagatcaaaacagtgaaaaacaaattgattttcaaagctatacatttataatgcgtctatgcctgaggtctcctgaaatatgaaaaagaataatacttgggaacattttttgcatttcagaaataggcacatttcttatacagagctctatatttgaccttcagacatattcaatcattaattcattcttttgagtatgtattgtgtacctactctgtgcagaccactgtaggggattatagaattactaaaggatattccagccatcaagaactttttaaacctactgaggtgacaaaataaagcacacatgcatgcatgcgcgtgcgcgcatgcacacacacacacacacacacacacacttgaatctcaaccctataaatctttgtgtggggacgttatgtgatgcccagagtcagtgggtgtcaggggagtgtgtgcatggggacaggagggaatggaaagattgcctggtgtgactaggggagccacaactaggaacacattgaggaggtggccttgcctcaaccttctccccagtgacatatctttctcatgagaatagtgttaggaaaattcataggcagaaaataagacaaagaattgatggccccaattaagaacctaatccccaaatcccctgaagcacaaactggtggagagatgggtgagggaacaatgggggcaatagcagttataatatttgtaatgtctgcagaaaatgaataaaatcaacagatgatttatttgggaggtgagcactaatgaattctcatgtgttattcagaaaggtcggtttaccttatatttttatcactcccagtcttccagtggtggacctgagacccaaagttcaatataaataacaaagcagcggcaaatccaataagcgactttgctcttagctgcccagacaagaagctgcaagacgacttctggaacctcccatgggtcaattcactgtccctccccagggatggggcctgtttcttcaggccagtaaccacttatttctgggccctgcatctgtgaaactgaagcattttccagtgtaaaaagaaatgggaagacattcactcaaaatcctttacttgggatattgggaaactgaggctcagcaaattcaaatgacttatacatagagtgaccacataatttatgcaaaattataagtgaatgtgtatatcactgatgattacccagaacagcagcatgcacctgacctgtttcaggcatccaggacattggatcacccccaataaacaatgagaatcagaacaaggacccacccattatgccccacacacacttggctaccttcttttgtttattttgaaggctgagtccacaagaccattaggaagatattcagcctagaggtgcaatatgtgcctggtgcccattttggcttggtttatccccactctaagtagtgcatggaatgactgcggttttgaatgtctatgacctccctttacctcatcctcaagccctcacccacccccacccttggctgggccagggtcactgtttccagtgccctgcaaggggtgtgggcagcagctctaaccaggctgccagacttctaggctctgcccgagagcccagggctgccttatctctgatcctctcaccctactgattacatcagggcgagggaagtttggccttaggagtcaatgtatagaggggaggtatcaattcctatagtagcatgttgaaatggataacagaatataaccagggtgccagggaaccttgtcctggctgtgctggtaaataggtgtgtggctctatagccctgtctggatactacttgcctcttctgcaaaatgagtggattggaccagaatccttgaagtcccttgcaataccagggctccacatcagtgtcagagagaggctgtctcaggactgataaacgggccaaaggtacctggtgccataatcacccaccaatggaggatgaaggtgtgaagaggtgccacgtggcatcttccgcacatgagcctctgtgtttgcacacagtggaagagaccatggcgcccgtgtctcagccacagccctgataccacatcttcagtcatcaaggatggggatttacactgtaataggacaaagtggaaactccactttttaaaattcaattcagcaaacttttttaaaaaatgtctactatatgttagaaactggaaaatacaaagatgtcaaatataagatttctgccttcaaggagactaaaattttggagagagaggtatatagagaggcagatgtatagacaggttaaactaaaatacagtgtgataaaggctgtagaaacagaaggggaaagagactgattctggaataaggatggaaattaaaaaaacaaaaaaaagctggcctggtgtggtggctctggctcagggctgtaatcccagcacttctggaggttaagcaagagggcagtgagagggtcactccagccaggaattccagaacagcctggtcaacatagtgagaccccgtctttacaaacaaacaaacaaaatagccagatctggtggtgcgcacctgtactcctcgctactccggaggccgaggtgggaggatcgcttgagcccaggaattggaggctctagtgaactatgattgcactactgcactccaacctgggtgaaagggaaacaccctgtctgtctctcttcaaacaaaaaaggttatgtaagaagataccctgcacaataccaatgccttgcccagaggagcagtttttgagttctgcagtcaacctacttgaatttaagtcttggctccaccaccttataagcggggcaagttacttaatagtttgtgccttggtttcttcatctataaaatggaggaaatagagtgactgtgtggataaatgattgtgtggataatcaatccacgcagcatacttggcgctgtgcctggcatatagcaatgtccagtgttactcagtaaatgtttgcctagtaaatggatcccagttttcatctgcaatccaagccttttattttgcatattcagatgggcctcccatttttagttcctcactgaacatattcattatgaatggctaagattgagttcagacttaggatcctggtgttcccaccctaagagataaggcctcactctgttgcccaggctggcgtgcagtggtgccatcactgctcactgcagcctcaacctcccaggttcaaatgatcttcccacctcagtcctcctggtaactgggactacaggcacgtgccaccacaacccgctatgtttttctattccttattaaagatgaggtttctccatgttgtccaggctggatttcgagagcttaaagtcacaaaatgttgggataggaaggaacctgggagacagtttagtagtctcttcattttatggacagaaaactaaggcttagaaagttaagtgactcgcctgtgggcatggcagtcctctggtggcagtcgtgggattagaatccgggaatcctgactcccagaccaaggagctccctccagcctcaactagatccagatcctcgaggcctaagcttcgctctacactgacactcaggccacagcaacctggggtccctccctcctctttctatggcgccccaaacaaaagactacctgtttcccagtacttaaggcacatctaaggaagaatttaggacctttcccagtccagggctagctctcaactcaaagagggaagaaaaaaaaaaaatcaaaaaccacttcagaccataaatgctccatgttgcttacaatgttgactttctcctttaattctcattcagggagactgcttcgcaggggatctgttcatgatcctcaccttagtgtcaccaacagaggtggccgtgggtgctttccgtagaaagggaaggtgacaggtgaggcaggcaggagctcgggccacctgttctccagcctaatggcctcaggtaacagcccagcagcctcactcctacttccccaaaggcaagagaagaaaaacgaggcaacaaccagagggaggaaggtggaactgggggaaactgagcgcaggggtggagaatgaactaagctccatcacaccttttcaagcacagcaatgacagtgtgtgctgttataaaagaacacttgctccatgagaacattagaaacgtacaaaaaatttcacgcaagacctcgccgtctttatacgcaggtgtatttacgttgatttctctacctatcttatctatcactatataattcgaatgaaccctaatagaatattgaccggtgtcctgaattttctcctcccgtgcacagcgtgagtaattcccgtgaaactatgctcatgcggatctagattgaatctgatccttcgggccgcggcggctccgcctgggagggcgtggcccccgcgctggggcgggaaccggcttctggggacccgcggcctctgcgcctcagccgacctccaccgcgggtgcgtgcgggggtgcgggggtgaggggtgcggggctgctccgtcgggaggctgggagggagagcaggcgccgggacccacgcgagggcgcggacggacggggggcgggaagcgaggctgccgaggggaggaagcggggccggcgcagcgggcgccaggccgggcagaggcgggggcggccggccgggggctgaccccgagcgccgccgagtttgcgccgcccgccgccccgcgctcgcctccagccgcctggggttccgcggcggccgtcagcgcgcacctcatcaataaggcctgccaggcgccggccccgcggccatccatcacccgggctgcacccccggccgcgcaccgaggcttctgccagcgcctgcggggcctctgcgtggagtgggccggcagcgtttttctacccggcaacaaatacatggctttattccacttcttaatcccagtgtctgttaacgatgtggtgttcatttgttcctaaagagctgtaaggaagcttagaaatgattcggcaagctgggcgcggtggcgcatatttgtaatcccagcacttagtgaggcagaggcggcaggatcgcttgagcccagcagatagagaccagcctgggcaccatggcgaaactccatctctacgaaaaaataaaattagccaggcgtcgtggcgcgcgcctgtggtcctgctggggaggctgaggtgggaagatgtgagcctggggaggtagaggctgcagtgagctgagatcgcaccactgcagtccagcctggtgacagagtgagaccctgtggagaaagagagaaagggagaaagaagagagagagagagagagaaaaaaagaggattgattcagcacaaacacacacacacacacacacacacacacacacacacacacagagagagagagagagagagagagagagagagacagaggattgattcagcacaaccggtgcatttcacagatgaggagaccgagggccagagtgggcggctggcgtgcctgaggccacaccaggaggaggtgatggaaactatactggggcctgcatctcttgccctacccccactcccagcccttgtgccctccaaatgggcactccgcaggtccaggatcgatatgagtgtttggcatcgaatgtgtgaaaagggccaagtcataggttatgggtgtgggtgtcagtgcatgaacagcacagagtccgcaggcattctgtcccccaactcaggccacagcctgtgtgtgcgtctgtgtgcatgtgtgtgcatgtgtgtgtgtgttgaggtccagaaagagtactaggtaaaagagaggggggaacacctctacattaaaagcaatgtgttccttgaattcatttaggtcgtctcccacctgcccttttccccaaggaggtgccgtgggtcccccttcctgctcgtgtctgccagcgctcactcctgctcctgtctgcaggacgcttttgttctccggtttgcgggtagaaacttgtgttcatccttgtatctacaagtttgcatgatgcctggcacatagtaaacattcaataaatgtttgctttgtgaattgtagctcttatgagggaattcgaataattctggatcagagggcttgtaggctgaaagaactcacagatcaggtgtccaatctcatttcataagagggagactgaggctcccagcattgccccattgaaccgttgcctgtttcactcaaggccttcctctgtaaggtcagagctggcgtggccctcagggatcctttcttttcttcccccagaacattgcgctgccaccagctctccgagccgtggactgcatcctcatcacttctttcccttgccaccttttggttcctctgctgcttaattagcaagctctcccagggtgagggacagagaagatcatggaagccaaactgtctgctttgttcctaagaggaaacacaatattttgtgggggattgttttgtttttgttcatggtgttgttttcttagtgttggtggtgttggattttaaattcaaattcaaatgacgaaattaaaatcagtgaccagtgggtgtctgccagtcttaacatccatttttcttccatgatcacagaggtatgactggagttagaaacaatcatattatcaagaactctgggaagaggtagaaacaatctctctcctctctctctctctgtctctctctcactcacacacacacctcacttttattgaagagcaagggtagcaaagacatcctgtggcccaggcagtcagtggctttgggctcttgtgtgatgtccactagactataattgctgtatatacaagtccagagtgtggttttatctggcacagagcactttcatcctgctaccttgcgccctgatggtagcccatccatgtgaacatcgtgacctgcaactgagcgtaatggaaattgacttaagaatgacagccagaggctgggggcgcggtggctcactcctttaatcccagcactttgggaggccgagaggggtggatcacctgaggctgggagttcgagaccagcctgaccaacatggagaaaccccgtctctattaaaaatacaaaaattagccgggcatggtggcacatgcctgtaatcccagcaacttgggaggctgaggcaggagaatggcttgaacccgggaggcagaggttgcggtgagccaagatcgcgcctttgcactccagcctgggcaccaagagtgaaactccatctcaaaaaaaaaataaataaaataaataagagccagagtaatgggttctgcagaacgatatcatcttgtacagaaaaggccatgtttcactgactgcttttcccttagtccattcagaaatacagtcctacgctcaaggggccaaagcgtttctctttcaaggccagtccttggcttacccttgcctcaggggaacacctggaccaaactcagtttccaaggactgactggttctctccgcttcccatcaccctctcccaggcagccatcaggttgttgaaagggacttagcaatccctgagcttctgctgtttggcttcaagaccttcaggatgtgagaggaggataaccctcactctgacgtcacccttcctgcagcctgcccaaaaacatgagtgcaccggcgctcgtatgtttgtgccatacatgctcaagataggcactggagctgtacccaggatggaccactgtggccattcctgtggactgaggatgagcaatagggaggaccaaccttgaaaaatgatcctttaaaaagaaatgcaaggctttcttttgtatagaaatcacttttctaacatattttagatgggagtcaaacgtgtaccagggatgtggactcgcactaaagacaggatggggctggagagaatgggagctgaagagtcttatcctgctccacctgtgctctttttccttctgcttttttcaaagccagatttattgaagtgcaacttatatacagtaaattcactccttttagtgtacagttttcagagtcttgacatacacacaaattgtgtgaccaccatcacaagatatgagaatagtcccagcgcccctccaaatttcttcctccccctctacagtcaactcttccccctcctcagcccctggcaacctctgatctgttttcagcccctattgttctgtcttcttcagaatgtcatagaaaatggattttgtctatcatcttttgaatattcttttacttagctgaatgcattcgagattcattagtgttgctggggtgtttgttgttcattcctgtttgttactgagtagtattccattgtatggatgtacctcagtttacctattcccctgcttaaggatcatttgagtggtttcccgtttggggcaattatgaataaagctgtaggttttgaaaataacaacaatactactttagagtttaaagtttaaaacacaacttatatttagctcttcttgtcctgaagctcattgcaaatagtatatctgctggggcatgttcaaagactggggtgaggacgtcacaatccctgacaaaaagtggtgtatggaggggtgtgtgcatctgcattggacgtgtggaaagaaagatatgaattcagagcttcagaggtgcagcaaagacagagtgctcacagggtgattgagaaactgaggtggcaagtaagtctttcatttactctacctgttctgagcccaccagcccctgagcctacccatctgctcagggagagtgtgggcccctggaactgggcatctgcagagacttcctgggggaggggtggactttgcccctcactggcggaggccccccggggagatggtgtgaaataggggagggaggaggcgatgaggtcgggatagctctgcaccttcctgagtgacatcctgccagtgccctccacctaggtgcggagggctccatttcactgcgcccctttgcaccttggattttctctcttcacttccttgccctttggcaacttgctgttcattagcacctctgctgcagaacagggggcagcaccagaagtcccactctaaccggagagcccctgtccttctgtcaaacacacgcacaggactaacgagggggatgagtggaaaccagccgcaaagaaatggagtgggaggttcttctttaaaatccattccgttcagaacacagtgaacaccctttgacagaacaaggactatctagctattccaagctccgtgcctcccctttcttgagactgttgttacaagaaaccgatgatttctaacaataggaacctcccagctggggaagcggtgttcggaggggagcagcgctctcggtgggcacctgctgcagttggggagggagaggtggtcgtggaggccactttcccctccaccgccagggaagcctggtctgtctgaaggggtcctcgcctgcgccgaggatggccggacggccgggcctccggccccagcacagcccccctttcagaggaccccgggtcttcgcgcctgcggaccagaggctgttttcgcacttgggcttcgcgcttccttgacactttcctgtctctgctcgccgcgccaggtcgcggcgcctgcctgggcgtcttctccaactccgggtcacctcggggcgagggcaagggtgccgggccggtggggcgttccggccaccacggggcggaggagggagcggcctttgcggaaacgggccgagctggctcagggaatgccagatctctgggggacccaccagtcccctgatgtgcgcgttgaggtcttgggcctggcggcgctccagccgcgggtgtccctaccataaccactgtcctccccgggagctgggcaagaggagccctggactctgggttgacctcgtcccggtcgggttctctctcctcccacccaggcccggccgctttctggcgtccgtcctctcccaggaggtcctggcctctctctgcgtcgccaagtctcttgactcccagctcgccttaacttcccagggtctgtggtctctctcctttctctgtctctgctctctctgcccgtccattgcctgctttggtttttccataatatttcatcattcaacactgtatttgacttacttattgtccgtttttctcttacagcatgtaagctgcttaggatagaattcttctctactttgttccatgctgagtactcatgcctgtagtattcctggcacagagaaggtgctcagtcaatgggaaatgaatgagtgggtgagtgagtgaatgcatgagtgaatgaatccccatctctccctctctgctgctggccagtcatttctctctgccctggtctctgcctgtcctcctctgtctctctcgcttttctctcccttctcttgtttctcctcctccactcctcaccctgcattttttcctctatccggctgacttggtctctccatccttccaggatttatgggttgggctccctatgcctcagaaagggtgcccctggcttctggtcagccttcatccccggaggcccggggactccctcgccagtctaacagcctaagcatctggccaggttcccagctcaacttcccaaatcctggctgtgcacagggaagtcccttcttcctgcagtccccaggacctggggaccccggggtgtccttaggagcagcctagatttgagctggtggtttgtaggcgatagcagctccacaggcagatgaagccaccagggagatttgtgccacccaggctgggcccctccctccacttctggccagtattctactctgagaaatggcagtcctgcccaccagtgcaccaggtcccttgaggggaatgtttcattctccatctccgagcaactttgatggatgttattaacagccctttttaaaattttaatcattcacccaacacttattgagcacctactgtaatccttgctttgggcagaccaggattttgatcactgcattcacagagcataccttttgggggtgtagaagggaggtgatcggtgcatgtgtgtggacagccaaccccatataaattactttataacttcagggggcatggacaagtgaataaagcacaagatcattttactagtccagggatgttaaccctggtcttgctctgggctcagcacaaacaacactgtgacttcaaaagtctctaactggggagtagcaaagccccatatgtgaaagaattggggcctgtgtcaccaagagagatctcagaggaggcaatccccgaagaaagggccccttacagactcaaagaacctccagtctgggaaccagactccctatgttctgggtggtgggtggcctgggcagtaggtgttagcagctctttcaggctgccattgtctccaggtccttggatggggagggagagagggagccaggttggcagcaggaaaagaaacatacatggcggcgcctgcgtggccactgcgcctccagcgctggcgctcctcaacctgctggggcccctgcctggacttgcaggcactggaccaggcttcagtcctagcctcagctacgctggacctgaagagcccctccctattcaaaaaggctatggtgtccgtcctgaactcagcaaaaatgttcagagattcctttccacttttttccctcttcctgtgggctctcagattatgagatataaacttttttaaacattgattttattttttaaatgttaaacatgctcattaaaggaaactcagaacaatttttaaaagacagtttttaaaaatacgttttcatggtagaaagtcgatattaaatagaatggaaaaaaaagaactaagattcaggaatccaggttctagacctgcagtttcgcccttgctttgccacctcagacaagtaccttaacctctctgagcctccatgtgctggtttctaaggtgagggcgataacaccgtctttcccttcctcttgctaatgatattgttgttccctagagaaaaatgagatttgaaagtgttctgtaatctggaagtgactataaaatatgagagggtgtgccagaaactctggtcctcagggctggaagcaccaggaagcatttgaggaggtctacgagggagaagatgtattcgctttgcaacccagagtagtaatttcgaaagcaagaccattaacaaggattgctccttcctctcctctcgtctgtaaccggctgcagagcacggttccgggcgaacagggcggaggctctacgtccactccgtatccccaagaaagagtgtccgaggcacggaccatagcaagtgaaggaaggtaggtcgacgtggccttgcagctgaattcgttctccatttttccttcagcagggacgcatcctgctctgcaccctggttctcggcgctgcgcccgcggaggctcgtgcagggcaggctgcccgtgcgggtgaggactgagtgccgcgcagggaaggagtatcgcagaccggcgcccaggcccagcgggggaatccaagggccgtgttgcaggactcggcattcgttctgcgcgggtcaccttgaatgtctgtccggatccctcgcggcagggccgcagaggcgcgtccatatcttggaggaattcgttccatagaatgaggtttgattctctctggggtttcttgttttccattataagactctggcgaccttggtggcgccagattttttcagatgttgcttttgttccgggtgtagcggccaagatcatggacccaggcgtggcacttggtttaaaacaaacttggacaggtcccaccaaaaactcgcagaaactcggcgctggaaaaccatcagtggcttcactgtgaattccagcatccaccgtttatttttatttttggggggaaccagtgtttagattgctctgtacacaatacgcagcgtacaatttgcctcttctggggtatggaccagctcaagtcccaagagccttaatggaacagggtaaagcaatttattcttgccttggagatattttttaaaagagtacagtacacctaagtaattcttgtttgtctaaaatctgacgacctgacactgggtcattagacccaggttcttagaaaaaaaaaaaaaaaaaaaagtcaaagacgttcacagtgttaaattctcctcctagactacgggaaaggaaacccgagagaggacttgaatggggattgggcctgtctacccaggccagcccaggcatatcttccttaaaaatagccaagaggccggacctcagagcacccacccgctgccccccttcccagcggcctctggagcgagagagaagcctgggaacctagagaggcgccgataaacctcctccagccggcggcccagcgaggccttgaaatgctccccgctcctggcaacgcacagccaacctgcaggctcccgcttggcccaagggagggagggggcgagcggagagcgaaggaggaaaggagggaaaaggaaacacccccaaaaaagcaggccgtttgccaaccacccctggtttgtccttgagctgaggccttggggagaaagttggggcgctggacctagaggaaaaagccacaagaaacataattttctctgtcccaggcgacttccagagacagcgaatattcctgggtcaggggatcccaggtttcagtccactaggagtgccagcggaaggtgtgggtaaaggaccggggtggtggggggtggtgggaggtggtaggggtggcccagggttggcagaaagcggcggctcaggtaatctggggttccttgcaagcaagcacccagcaaaagcaggcgttcccacccagcggtgtggcagcggccatccacagtacagcctgttatagccccaccatccacagcacagcctgttatagccccaccagtgtacagagcagggggttgaagtttagggaggatggggagggcgagggtgaaggatcgccgcaaggcaccgcacctcccgctgcagcccatcccgcactactaggagaagccggcgtaggagcgccgcctgtgtccttggctgtggggaggacgtcagatggcaccccgccagacactaagccccaagcccctggcttgttgctaagaaaattcactgcccggtccagactcagcccttttcgccctttaagggtcgcgcgtgggaggcagctctgagaccccgggtagcgctggagccacagatttcctccgagaaaagaaaggccgggatagcttcccgctcgcccaagcccagattttccactctccaggaaggccttgcaggtccctgccgcaggccttggcttcgcgcctctctcgctcgccccccacgaagatgattgccggtttcaaaccgggagcagggagtctgcttccttctccgctgagtccgaaggatcgcagattggagcgtgctccggagaccgcttttccgcagcgccggcctccgagatccccagcaccccttcagccttaagttcccacgtttcgggtccgtggcgccaattctgctaagtagcaggctaggaattgggggaagtcggagaagaaaccctaagtgtgtcgcccccagcttccgggatgcaggcccgccggggtctagaggggcggctgccgtgcgtccagcctgtgcgcaggcctttcgccgctcggcgccccaggcagcctcagtttcctttcctctgtttgcgccccagtgaacctccgcacctctcattcagggaagagaattccccgcgcagccgcgctcgtttcttcctctgggattttcctgagaatccccaggagttggccacgatcccatggggggtttccttctacccagccccgcgtcctggcctcgtccttaacccccgggttgccttcactcaggctgggaatccacgattgatttcctactacggaagcgggtggcgttcccagcctgctttcggagcagcacgggtttcgtgcagggtgttatcccgaccccttcccccatccctctaatctggcttgagaagcccgtgctggagagaaaaacgcggccttaaaaaaaaaaaaaagtttaaccgaaagcgtgagagccacccgccggctgttatctggggctgaaggctgcggtaatcgatgggttatttttacgcggtaatagggccctgtgattgctctattaacctttagacctgtctgagggactctccggctcgcagccccgctgcgctggggcctccaggctctgacgccgactcccaactcaggcctgacacattcccctcccccataccctggaagagccccctccatgaagaagctcccctggaccgcctggctccccagcccttgccacgtcccttggattggtgcagagccgccgcaggctgcagaaaaaagggggaaagattagaagagaggaggccacaggagatgggaagtgtcgccaggaagggatgcagattgcataaatacataaaattgaggctgaggcctgggctcccgaccatctccctgggattttgggaaggcaaaagggaggcttcggtctctacgctctgattttaggaggcagtctgggtgtctcctgaacctccaaggaatccggggctgggaggatccccactacccctgcccaggaactagcatccagccgggcaccccgggtgacccagtgccccacacaagatcgagagttgagcccaagaggtcaccttcttctctactggccccgcccctcgcccgccgctgcgggatgaggaccacaggaagggggggcggggagggagaaagggaactcattaataaagctgaccctgggcaccacagcgaacccaatcgacctccggctgggttgcgggtgattccccgctccctggcggtagcacttgggcattttccgcggagaccccagagcctggactttgcctgctgggggagctttccgcacagtcccgcagcctgcgcccagcggaggtgtagccggggccgcgcacccccgccccgcccttgcacgtgactcccacaggccagtcagcgccctagggccgagttgctgggccggggacccgagccgcgagctggggacttggaggcggccggcgcaggggccgcgagaggcttcgtcgccgctgcagctccgggggctcccaggggagcgtgcgcggaacctccaggcccagcaggtagggcttttttcttccctttctttgctccttcccgcggtcccccaaactcggagcttctccgcctttgcttgtctggaggtagagaggtagctagtgggaggaaaagagacgtgcgctactcacttcaccgaaattgcccaacccctgctctgcttttgactttgccttagcaacttctttaagtcaaagtaagacttgggggcaaaacagagaaatattggaagcgcctttggattctttccgtgtgaacttgaacgctttcaatccctgtccccgtgtgcacattctccaacccttgtttgcatatcgcaggccggggcctgggtggtgatggtggccgcgtgaagttaccgggactgacgggcccgggacaggctgcacggcagctcgcacatggagggaagtagacggaggcttgtcgcccaccagcgactccggggacgcagggtggcagtgccaggcagctccgctgggcctcaggggcccccgggagccgctctgaggtgcggagaggctgctgagtggcggaactattcatgccctttctggccggcctcctcgccctcggggctggggtccagggactgaatgctcctctggaagctcaccaccccacctgcccgcgctgcttctacctgaaactggccaagggcccgagcccggaccggagccgtgacttccctccgccggccacggggctgcccggatccgccgggttatgtcgcttggctttgggctcaggggtcaccgtgggcagaggggggtgccggggtcgcggactgccaccaggttgaggaaaggaggggccttttggctggggaaagagcgtggtgggggacccgcggccgatggaatccctggggcagcgcggcccgcaccgtggaggttggggaagcgcctcggggaagtgtttcctgtgttcccagaaaaggaagacaaccgagagcaggtttcaggcttttaaagaaagcctggggtgtggaggtgatgctccgcacacgtctgtgtctcctcccctgctgcggccggcttggttgtgccggctagcgtgcgaccgtcctcctcgctgcaggccgagagcggaggcgtaaacccaggccagcgaggagtgtcctataaagggacggggacttttcggcgcttgcaattctcccattctgaaaaatagatcggaagagggctattggttgattcttgaaaggggagcgcatttcctgttggcctgcgaatttggggtgaactgggacaagtgatcagaaggagagcaaaaactccccgattttggcagcctcgggagctgctgggctttctccgccaactgcaggatccaggctcaatttcaacaaccagccagaggcgttttccaagagcagctaattccttgtttttccagaaagttatagaggagtattttctccaccttctgttgttctagtaatccaactcaggcactatatcagccatttgaaaaggcagagaatgtgataaagacaaatattagattgatgacattttttgcatttaccttttaaagtctgcaagttactacctgtgtgtatactggaagttggattataaaattctaaatctcctttcttttccaaagttatgaaagaaaaaaaattacattatcttgaagaactgcaggagttgagtattccagaaaatgcaatgaaataggtcagctacttgattttaaaagtcaaatactggatcttttattaaggtaaacccataattctttaactttattttcaaagggaaaagttggtgacctcaggtcaatttttaaaaaaatctattctctaaccaaacttgctggaatgaactatttgccaaaccaataagttattgcatattttgaaagcaaataagcttttaggagttaccatgtgactatataatacaatacagtactattccattattattactagtgatgttgcaaaaaatggtgaaaagcattatgtagtgtgtattaaagattccatttccagatttttacagtaataaagatgatcatttattatagtatatacatttgaggtactttcttgtattatactagaaatctgtagtaatagtcaactgttatttagaactttctttttgcctgttaggacagttttataaaaatctgttataagtgttttacaaatattaatttataatcctcactcctaagcttcacgatgactctacaaaataagtacctttaatatctgcattttgcagatgaggaaactaaggcacagagaggctaagtaatttgtctaaaggtgtttattccgtaagtctcagagcctggattcatatatagttaacattcttgtaaatctactattgaaataaaaaagaaaactttgtcgggagtagttgcctcttcttaaagagagaaatggagtgtggtggacagcttcaagcccctggagccctactgatcccattcccttcccccaccccttctgattgtactttgatcttagacaagtttcaaaactttccagtgctccagttccctcttgtaaaatgaggagagacacctgtacttagtagagttgtagagaaaaggacctggaggtaattcagacagcaggtaattcaaaaagtggagctcttattttatcagaaaaattgcctgataataacaaaacgcaggatgctgggaagtatataatcaagttccacaaactgctctttccccaagcacccaccttggtgttatgattctgcttatgggtggatttattattctatatgaagaacccattcagtgaattagaatggtccagtgggttattctgtagagcggcattgtacattcttctcacttttctggttctgatatacaatttgcaaaacgtctaaattgtaactatttgcaagaaacctgtaacttgtccgatttgacgtccacatggttagtgtatggatgagggtttcagaaccctcttcaggaggcttagcagacaccgttgttcacttataaacatttggactctacttctggttttttttttttttaattacaaacaaaactttgttaggttgttgttttgtgtaaagtttgtccttgtccccccaaggacaatctaaagttctttctaggccagtctccccatctttcttggggagagatggggaacagaggagatgagagatttcttgggtcccaggcactctgcattaacgccaaacttttggacttacaaaaatatgcttgcagaataaggtaacattaaagtccttcctgacaagcaatacaaaaatcattgaccaagatcacaaccaataactgcacaccaaagacccgggaagcccctggtccctggggcgcctctccccaggcttgcctgggccgcctgacccaacgcctggacaaaacaaaggcccctgcttcccggcaccgcgcggcctccggagctgcacccccaaatccccgtggcgacttcatttgaagcgtggaagaagcaaccacgcaagtggagagtgggttctgaaagctctgggatgaaccaccctctctctttctgtcgttcctcttttaggaccccggctgcggcgaggaggaaggagccagcctagcagcttctgcgcctgtggccgcgggtgtcctggaggcctctcggtgtgacgagtgggggacccgaaggctcgtgcgccacctccaggcctggacgctgccctccgtcttctgcccccaataggtgcgccggaccttcaggccctggggtgaattcagctgctcctacatcagcttccggaaccaccaaaaattcaaattgggattttccggagtaaacaagagcctagagccctttgctcaatgctggatttaatacgtatatatttttaagcgagttggttttttcccctttgatttttgatcttcgcgacagttcctcccacgcatattatcgttgttgccgtcgttttctctccccgcgtggctccttgacctgcgagggagagagaggacaccgaagccgggagctcgcagggaccatgtatcagagcttggccatggccgccaaccacgggccgccccccggtgcctacgaggcgggcggccccggcgccttcatgcacggcgcgggcgccgcgtcctcgccagtctacgtgcccacaccgcgggtgccctcctccgtgctgggcctgtcctacctccagggcggaggcgcgggctctgcgtccggaggcgcctcgggcggcagctccggtggggccgcgtctggtgcggggcccgggacccagcagggcagcccgggatggagccaggcgggagccgacggagccgcttacaccccgccgccggtgtcgccgcgcttctccttcccggggaccaccgggtccctggcggccgccgccgccgctgccgcggcccgggaagctgcggcctacagcagtggcggcggagcggcgggtgcgggcctggcgggccgcgagcagtacgggcgcgccggcttcgcgggctcctactccagcccctacccggcttacatggccgacgtgggcgcgtcctgggccgcagccgccgccgcctccgccggccccttcgacagcccggtcctgcacagcctgcccggccgggccaacccggccgcccgacaccccaatctcggtgagtaggagcgcgagggctggggcgcgtgagggccggggcaggggccgtcttgagccctgtcgagggcctcttgtttttccaccaacgccttcgttgggctggggatggtgcttcactacctcgagtttctagggaaggcagaagccagtgcggggctggcgacatcacagccccagaagaccggcttctgtggaaggggccgggcctgcccgccggggcctcttctgagatggtgtcagggtcggagtgcggcctccccgccatcccagacatcgaccgtggccgcgctgcgctgtgggtgacgcgggaggacagcgggctccctggagagccgggggcagcggcctgggatttcctcgtggaaggtgctggagattgctgagtttctgcgcccctttcctccccgcccgccctcgggcctccgcagggaactgattacaatggtttggaccgcagaccttctgggccatttggcggcccagctggaggatccctcggggtagctgatgattttcccgtcgggggtctcacaccgagaacaaaggagggatggacaaaggagacgccggggagatgcgcggaacaggagccggcactgtgcgggtgccacccggccgagcgcgtgggcgcatcatgcgggcagcgggggggggggcgcacacgcccggtcagtgtccgggaacatagggacctcaaacgcgcttgttcatgacacccgagttaaatggagactttgcagtcgcttgcacgcgtggagcctcctcttctcgcgtgggccagggttggaaataaccgttgtggtaggttccatgcagtgtttccatcggatgtcagacggggagggacggcaaacctgtctcaacctccactgattcacaaataaacgcagcgggatctgagaaggggcctgagtacacgggccgggggagaaagggaagtggcaacccctagttcaaaatgcaaacgacctctggaatttcgggaagagacggaggagtgagtttggattgagcccaccctgtgggggaggggaagcccaggcttgagaagcaaagctcgcgtttattgaccacctactaagtgctaaatccttctgcatttgttctcactttgaagagtaaaggctacccctgccaggtttccagtcttgggctggctccgagaagggcctaggctttgaagcgcttttaaattgtcctctggccctgggtggccagggaaggttcccgggggtgcagccaaatacacatcgccggcaaactgattaaccctgaaagtggcgccgaggcccggtctgtggctcttggtgttcccctccccctcacccctcttgggggagccagacggccacccccaggggaggaggggcccggccgagcctcgccgcgacttttgcgagatagcgcggcgacatggccacacaatggagcccgcaggcgggagtgcggggcggggcgcggcgccctggccttgcgcgcttacggggtcctctccagggccctctggggcctctgacttaaaatagggaggactgggccaggagatcgagaccatcctggccaacctgttgaaaccccgcctctactaaaatacaaaaaaaaaaaaaaaaattagcggtcgtggtggcgcgcgcctgtagtctcagctactggggaagctgaggcaggagaatcgcttgaacccgggaggcagaagttgcagtgagccgagatcgcgccactgcactccagcctggtaacagaacaagactacgtctcaaaaaaaaaaaaaaaaaaaaaaaaaaggactggtccagggagagtttgctttgtaaccccgacaatcctggagggaatttggtgtttggttaaggaaaagagagaagttaaaagtcatgagttacatccagcagtgtaaaaacgaaatacccgccgggcgcggtgtctcacgcctgtaatcccagcactttgggaggccgaggcaggcggatcacaaggtcaggagttcctggccaacatggtgaaaccccatctctactaaaaatacaaaaattagctgggtttggtggtgtgtgcttatagtcccagttacttgggaggctgaggcaggagaatcggttgaacccgggaggcggaggttgagtgagattgctccactgcactccaggcctggcgacagagggagtatgtctcaaaacaaacaaacaaaaaaccgaaataccatgtgaatgcacacagtattcagattttgaaatgtcagccatgccatgtagaggttgctgatgaagtgatgtttcccaaattcccatgtcagcaaatggcaagctgacctccctgtgcgtctctctgccaagaactgccacctgccttctctgggctcttcccggatagcttatgaagtccacagcctttgaatctggcctagagggtggtttttctcttctgcacccagccaagtgttttaggagaggtgcggctctctgtgagggaacacagggcatgttgaacttgttggcattcatagcttcagcgtgttatgcaggtggcacttacataaaagcaactgaaattaaaagcagtgcatgtggccaggcgcagaggctcatgcctgtaatcccagcactttgggaggctgaggcaggaggatcatttgaggccaggagttcgaggtcagcctgggcaacatagtgagaccccatccctacaaatcattttaaaaaattagccaggcttggggtggcatgcctgtagtcccagctttggaagctgaggtaggaggctcacatgagcccgaggccactgcactccagcctgggtgacagagtgagaccctctctcaaaaaaaaaaaaaaaaaaaaaaaaaccagtgcatgtgaatgtgctttttatatgttcttcccattacttgggctctcctacctgcctggcagctttagtgaggaccagcatcacatagtagctgaccctgagtcatggagggaagatgagaactgaccccagctttctgaggagttgccactgagccctaagatggccagacagtgtggtgggaggagcacagggttttaaagttgggcaaacctagattcagttccaggagcctcgtgtcatcttgggcaagttacttacctctctcggtctcacctctttttctgtaaaatgggatcatcataacaatttttagtgttgccttaaattagaaaagtaaggtaatacttttgaagaatttggctttagcccttcataaatgatggttattttattgaatagccactcactgtcatgtagagttaccaattttgctggtgtgcccaggactgagggttttcccagaatgtgggattgttcgtggtaaacctgggacagtccccagtgaacgcagattgttggacactcaatgtgaaaatgggtgcattacccatcgttgtggtttggtaatgagctgagaacaaagaagaaacagcagaggagaagcagctgagagcaaaggagaagcagcatcattcttccctctgctgagattctggaagtagtcatttaagtgctgccagcttcatttggtcttgaagggtgagtaggagtttgtcaggaaaagaaccagcaattttttaaaaaaagaaatattgaccattttataggaaaaaaaagaaagacaaagaaaaagaggccaggtgcagtggctcacacctgtaatcccaccctttgggaggctgaggtgggaggattgcttgagctcgggagtttgagaccaacctggacaacatagtgagaccacatctctaaaaaaaaaaaaaaaaaaaaattaactgggcatggtaatgcatgcctataactccagcaactcaggaggctgaggtgggaggatcgcttgagtcagggaggttgaggctgcagtgagccgtgattgcaccactgtactcctacctggagaacagagcaaagaccctgtctcaaaaaaagaaaaagaaaaagaaaggatatactctgctttactaatatgttgtgtagtaccatgaaataatacaatgcaacctggcctttgatttaaataatatatttgtcacaataggtaaaactatacagactaattaaccttaactcagaaactgtttttaatttcaatgaggagaaacaagagaacacttttttttttctatgtaactgctgtagttttaacaatatcttgccatagttcttatgttggttatgtgaatagggcaaaaatcaaaacaataataaataataaaagttaacaggggcctctgtaaagccctgaacttaggttggaagaaataagtgtggcctgactgcaatgtatgtgaactttaattcactccaagttccatatgagctacgaccctaagacaaatgttaaaatcattaattaggctgcatgaatggaattatgtgaccttactgagggcaggtacagagtcttactcatttttaagtgcctggcacatgttgggcacttagcaaatatttgcgtagggatcttggtggtaattgccccaggactctgccctgcctgggtccaaccacacagaatggctgcgtgagtcctttaagaagcaaactggagagccctaggggaacggtgggcaggatggaagagggttctggaaacttcagggaaccactggaggaaagcagggcttttaggctggagaagtcactgagtggatgaaagcaagatggagtatgactgtgtccaaatttctgaaaagcaaaaaaaaaaaagaaaaaaaagaccatgaccttttaactctgtgttagtgaaggtgagcagatattagatgtgagaagaacactcctagacaattgtggttgtgtggaaatgcagtatagaatatggcttgtcttcatcataaactcctgggcgctggaagcacttgtggtggagctctgcggatagttcttgccttgcagggctaggataggatctgcatgtgcctgtgaaacggacgtagccggagaacgtagctgtttccttttaaagaacccagtcacggtggttacacgtgtatctccatatggcaaaattgtggagctgtgctcttaaaatgggagtcttttattgcatgtacattacacctcagtgaagctgatttttataccagttaatgcttgtgagtacttaaggctgaaaaggagaccgaaatggaaatagattgtaaatatgccttgacggatatatggtggtaggtgttactggaaaggctaggaaaatatatttaagtatggaataacaattattttgtgtaatggagacataagcaattatgatattctccaaggatttcaaaaagtttgaatcatttttagagtcgataaaaataacaacacaatgaaatacatgtacagtatatcactgtgttattcaaacaatttatttaaaagaagttttgccccattagggatggagtgggggcattcaaggtgttctcagagtttttttatggtgcaggtcagtgaaaaaccccgaagtgttttctggatcttttgggacctgcttatcaagtacgctagtggctttcaaagccggttcatttgtgcagggaactttgtgagactggagaatgatttgtcgatcttcaggaaaaccaaagttgtttaactttccggttaccaccctgagcaggtcagtcagagttggggttggtctgtggtgctaagctgagaacgaattaaataagaaaggtgtgttggggtggccaggggtgtgtcactacctctagtgagccctgtcacttgcccagttgtgtcccatcaaaaggtcaggccacatttgctaggcactttctaagcactcaggtggaatgatgcccgggagacagttctagataacgctttattctgtatccctccccatttcttttctaacttaaatgcactaagaaaacaaacacactgaggtgtggggaaacaggaactctgatacctgtgggtgggagtgtaaatcgctctgacctttatggagagtcttaggtgtagtagccataaaattgcaaagtagacagcctggactccggaattttcacttctagggatttgttccacaagcacaccggcacatattaatttcagcattgctcgtaataacaaaattggaaataatctaaatgtgcatccttaggggaatgtttttatgcacgtggcacatacaaaccataagctatgtaggcaagaaataatgaagttcattatctaatgtatggaatcctcacaaagacatttataaatgcaggaagtgtatatagcactttactgtttgtgttaaaaaaaagaaagaaaaagattatattcacttgaaaatacaaaatctcacaaaaaatttgtaacacagatttgcctgtggggaggaaagcgggtaggtgagggataatggtagaaaagggactttcactatgcatgccttggaactttttgaattttttaaccaccttaatcatttttatactcatttctgtgccttattaatccatttaataacaagaaaatacatttaacatacagggaagttaaagttaagtttaatgtaaaaatttcaaatcatcggctgggtgcagtggctcacacctgtaatcctagcactttgggaggctgaggcgggcggatcgtgagatcaggagaccagcctggccaatgtggtgaaaccctgtctctactaaaaatacaaaaattagctgggcatggtggcacgtgcctgtaatcccagctattcaggaggctgaggcaggagaattgcttgaacccgggagttggaggttgcagtgagccgagatcacaccactgcattccagcctgggcgacagagcaagactccatctcagaaaaaaaaaacaactcaaatcatcttagccacttttaagtatacagttcagtagtgttaaatacctttgcattgctgtgtatcagatctttagaacttaaactctgcccattaaaataccactcccattcctctccacaccagcccctggtaacccccattctattttctttttcttatgaatttgaccactctagggacctcacacaagtagaatcgtacagtgtttgtcgttttgtttctggctaatttcatttaacataatgtcttcatgattcatccatgttgtagcatgtgccagaatttccttcctttttaaagctgaataatgttccattgtatgtgtagaccacgttttgtttatccattcatccatggatggacacctgagttgcttctccgtcttggctactgtgaataatgctgctatgaacatgggtatgcaaatgaaaccttttgaatttggagaatgtgactatattacctaattttaaaaacatattaaactaattaagttttaaaaaacagatacatgatattcatgaatcaacctgaaagtagcatctttttcttttttttttaaagaagattctctatttagtgtttatggatgcacaggaaaactgctttaaggcataagttgttttttattaaatttgtcttttacctattcttttacaattttgggggttttcctttatgctcaagcttcctcaagattcttcaaggcagatcaaaaccatcctcagtggcaatcctgtatttggcttttgattttgcttatttcacaggaggttgctttactgagagggggaaatctctactcctggtctcagtgctggtagtggatctaaatcagcaatgggcggacaccccagccccacactactgtggcttccccacttgtgggcacaaacagtcacgtactaggcaatggtgacctctccaggtaggcagttttccctcaggttatattggagttagaacctgcctgaaaaccactaaccggctgcagcggtgggattgtgtgaagaacaagttaccttcctccagggcaaggtgattcttttaaacaaattttaagacaatttagttgtactgaatttagagctgaagccagttgcaaatgtagctgcttgtgtctgcataagaaagaggaagtatgctagttttcctttccttgttccagaagagggcagttcttgccaacgcgagctgctgctttaagaacttgaagcaacttttctgacatctgaaactatttgtcttttgggaacttatttgtcctagcctgcctgcagaaccagctgttaaggctctgttgggaaggagtatcgctctgctatattgacctctggtagaccatgacatggccccatatgccatacaacataaactggttactaagagtaatttaatggctatctctagagctactcttttgttaccttctaaagaaggcagggaagaaaatataaatggggttataataggaataatcttgaatctgttttaatttatacaaaatacatttataagttttggcacattcacgtttggatactggctaacaactttttagcgagagtagcctgtatcttgcatgtcattccattgaacagtaaggtggatccctgtcaatgaagaaatcatctgatgccagggactttgaagtctttctccaagaggtagatacgatgatctctgttttgctggaaagaaagctgatacccagaaagagcctgtaatctcaggtccccgtgggtagtaaacagccctggtttggaacccaggtaagtccaacctgcaggattgtactttccccctttccccacactttgtatttgccaaatctgatatgagggcacttggctcttcagaaccagaagctatgtgtgattgaagggctctattaaaccttaggattttccatgacttgtcgctcccatccgcttcctctccccagggtagcttcttgtctgagtttccgtttgcttcccaccaatcactgtctctctaggagcaatgtcgtcctacggaatcttccgtatcattcctcaactgtaagctctgcagttcaggaatgcaatgttaggaatcccagtgttgcacaaacttcctttctagccgttggattctggtgtgcagagaactaaagagacttcccaggattcagacccttccaatgggaggattctcctaactctaggggaactgttggctgcttaagagcaaaaccatatggctcactcaaaaatccctttcctaagagaaatctataactgaccctctgtgttcccttttctctgaagatttcaaatatatttgtggtaaaagcagagaaagaagaggagaaaatcataataaaagcacaataatgatgattttagtaaagataagaatggggcatggatcaagacaatgactaaaaccccaggcaggaaaagccccgtggaattggtctgaactgaatgtagcagcccatcagtggaagttttcttgtttctggcaggtggcctatgcttttatctattactgctctgtaatcagaattgagccacgatattcaagtttcttatctgaatgatgggaatttggttttctggccttctgcattttgcaggagcccaagaattgacctgatgttttaaaatatattttccctccaaaggaggagtaaaatccagacaggtgggccattctgtgtgtttaaagtcattgaaaagcctctgcaagtaaaatttgaggctgtctgtaacccacattgaatagttacagatatattttattttggaggataaaaaatcaagaagttactaccacaatttggtgggaattttgaattttggagttttcctttgtactcaagcttcctcacgattcttccaggcagatcaaagccatgggttttgggatcccctaatcgcaaatccagttttgcttcttaaaatctaatcagtccttaagttattttttaaatcttcctttctactccccagttgaaatctccatttctacttctagaaatccagtcaaaccttatcgcctccatttagaactgatcgatagcaactggtgagcaggttaattataatcgcagaataaacgctgaagtctcaaagttcaccacttttgcaatgtttccaaacccctcgggaccatgccaggaggcgctcattgacccattccgagcaggtgtgggagtttgaaccaggggcagacaatcagatctgattcaaacaactcaatttggttgcttatctagaggttttcctatcttatgatatctgtcattttagataaaaaagagttcatcaattgagctgggaaatggcaaagttacattttattctgataaaagtttgctagttgttgttttatcagcttgggttgaaattgtgtctccgtcaaggtctgcaatgaccttttcagatattttatcaggtattaggtgggggagtcctttttttttttttccttctttgacctagaaaagaatgacctgacttccaagatcataaatcaaaccaggtaaagacaggcaataatacaggttgcccctcaaaattgagtaggcggggaaaacaaacaacaaataaaacctttccctagcatttggggagaacttaacttgacccgaaataaagaatgtagttcccacggagtgcacagatgtaggaaaatactgcttattttaaaaaagaaaatgctttccaggcaaaaatggcttcagagaaacacgtagtaattttttttcaagtagtataagggaaacttctttattttatgaaactcaatgtatatttattatagaaaaatggaaaactcacataaaccaatgtaaaaataattggtaatcttaccatccaaagataaccactgttaggcattaatccttgacttccagttatcctacatacacaggtatgtgtataactacattattaagtagtcgtgcaagttactgtttaaagtcatttcagcactgatggcaatttctgtaaaattagtgacccagattggatccttaaacactgatgccatttttaaataaagcagaaatgagaaattgaccagcactgtcaataacagctgaatggaagagttgggtgtaaaaacatattttttaatcttatggtatataatttatagccactttaaaactaaagcatatttgtaagttttaaattagggtccttgaagcgaggtgcccccaggacgtgtgatttactaggcctcactggggaatgggagttgcagcgctgaaatctgctatttgaaaaggggtgacccaagatcccagcagccgcagggaggtgaaagcacattggtctggcgcggagaaaccctgggctcctctcccagacccttctcttcctgcggtgtgactcactgcctctctctgcttgtgtggccatttgtaaggtgaagaattcaggtcaggtacagcaatggtgagaaggactgctctaccgccctttggagatgtttaaaatcgagtgtcttccggcatgccccgtgatagtcattcaggctgactttgtctttcccggtaccacagaggccacattaacattaagccttcctgtgcctgcgtggacatcaaactcgaattcatgcttgcctgtgtcaggtaggtttccacggctgcctgccttgttttaagcaactctgtgaaatcttgggtttgatggactcatcttttctttttaccttttattttagatttgggggtgcatgtgaaggtttgttacataggtaaactcgtgtcacggggatttgttttacagattatttcatcacccaggtattaagccccagtacccaatgcttatcttttctactcgtctccctcctcccaccctccactctcaattagataccagcatctgctgtttccttctttgtgttcataagttctcatcattcagctcccacttatatgtgagaacatgcggttagtttcctttcctgcattattttgctaaggataatagcctacagctccatgtatgttccctcaagagacctgatctggttttttttttatacggctgcattgtttttcttatgcaaagtgacctcaggtgctctgagtttcctgctgcttgggctttgcttttcagttaataaacccactgagtgttgtctgcaggtctaggcagtggtggagatttcatagaagttcagctcccttcacaccccagctccacatgcgtgatttgtttcatccatccaccagccaataaatacttctccccattccctgtgagcctggcgctggtcaggctgtaaagatacaaaatgaacagaagtgtctccgaatcccagcaacttagagcttgctaggggagggaacacgtggatgtgcactcttaggggcaggggatctgaagcgcaagggggcgaaagtgggttctacggagcccttaggataccgaaactggcctgggcgcctgaagtcaaggccaggcttcctgggcaaggcagacttgtggcatcctaaaggatgagtaggcgtttgctgcctataggaaggccattctgagcccaggacttagcttgaatcaggctgttctgcagtcccgagtggagggcgcgaggcaggaatgcaagcagaagcacggcgttgagggatgttagaatgctggaaaggtgagcaggattcgagcagcacttcagatatagcgctttggttatggtataagaaggcgcaagctcctggctgttggttttgttttgcacccaagcagggtgatgagcgcctcccgctgagtcacccatttcccatcggagaaggaactctggttaaaatgaagccgcacgctacaggccagttttggaggatttatgtggtgtgcttcggcagcagggcacggcggctgtgtggtttgagttcaaattgagggccaagaggggacaaaactcaagccaattttagtccccaaatctggagccctgccctgggaaggaagaggagtgttcgtctgacccagaaggtcaagcatcttgtaattctgccctcttcttgtactttctctaaaggtggtgggatgacataggattacaatatagataattacaggggacaatactatgatgcaaggatggattgccagaccctgtagggtggattcacctacctcccaggaggtgtagaggtgaagaggaagggctcagatcaaccgatctttctttctcatttgaacctctctcactttgatccatcacccttcctttaattttaagttcaatttctaccttttaaataggttaaaaaacatttttttgagacagactctcactttgttgcccacactggtctctaactcctgggcttaagcgatcctcctgcctcagcctcccaaagtgccaggattactggtgtgaaccaccacaccccacctaaataagttttttaatgtgaaaaatttcaaacataataaaaatagagagtagaatattcatccctcagctttgacaaatatcatttcatgaccagctgtttaatctatacattactcactttcccccacacagtgttattttgaagcatattccaaacagcatgtcattttacccacaaatacttttgtatatatgtctgaaaagtacgaggactcttttattttaaaaaatacagccccactgccatgttatcaccctgaaacaaattgtcactctttaatatcattcaatatccagtcactgttcaatttcccagtttgtctaattgtctttaatgccttgttccaatcaggatctaaatgaggtctaagcattgcctgtgttatgcctgttaagtttcttttaatctatgggtttctctttcatctccttttcttctccttgcattctgtttgctaaagaaatgaggcttttcccagaggacttctgcagactggattttgttgactgccttctcttcatgacattgaacatattcctctgtcccctgttgctcatgtaagtctgtgatgggaaaaataggcacactcagattcaagtttgtgatggcagcagccctggatgctcattgcctagaccctttactttgttaggcattgctaatggtaatattctactgccaccattccttcttcatttgttagctggaattcttctatagcaacaagcacatttttagcttattgaatatttggttacttggaggtacagtttgtctaggaaaggcaggatacatgcctgctacagtcgctttacttttcattgttcaaaagaacaaattagttctctagcatccttcaacaattaccaatgaaatgaaattgttttcagcatgattaagaactcatggacttcagctgagtatagaggctcatgcttgtaatcccagcactttgggaggctgaggctggaggatcatttgaacctaggagtttgaagccagcatgagcaacatagtgagagcctgtctctacaaaataaataaataaataaataaattaggcaggggtggtggcatgtgcctgtagtcccagatacttgggaggctgaagtgggaggattgcttgacctgggagttcgaggctgcagtgactcatggtccaaccactgcaatcagcaagaccctgtgttaaaaaaaaaaaacaaaaaaacctcatgggtttaaacaagcatgatgtgtttctatccatatatcctgattgatgttcagattgtcctatctttgctagagggaacttgcttaaactgagctcttttgacaaaatcttagtttaatagtttcttgctttccatcctataaaatgtcctaatctctttttatgagttttctcttgccaggcctggatttggccatttgccccaagaaacctggctcctgttagtgaggaatggcgtttggagatcaatctcagagctagctctgccagctgggcttattgctattgggttagtcattcaacatgcagagtcaggaaatacgtacccctcctaccccaaagataagataaaatacagcatgtcttcatactgatgctttcaattcaaatttagggctaaaaggcttttacttgcttcattcatctttttaaaaaaattatcttaaactatacataagataaaatgtaccgttttagccattattaagtgtacagttgggtggcattaagtacatccacagtattgtacaaccatcacccccagcagtctccggaactcttgcatcttcccaagtgaaactctgtacccattaaataacgtctccgtatccccttccctccagcctcaggcagcccccattgtgctttctgtctctctgaatgtaactactttagttacatggaaggacacagtattctcttgtgacgggctcgtttcctttggcatagtgtcttcaaggtttctccattttgtagcatgtcagaatgcagcatgtcttttttttttaaggctgaataatattccattgtatggatcgatactgtattttgtttatccattcatccctccatagacaattgggttgcgtctgcccattgaccattgtgaataatgccgccatttttacatgggtgaacaaatatctattcacctccctgcttttacttctttatggtatatgcccaaaagcggcattgctggatcctagggtaatgctatgtggtttttagggaccatcatcccattttccagagactgcaccattttatatccttcatggcatctttacatctgtcagtctttccaaaaatcccattctcaacatctccaacgtaattcttcattttctgtatgtcataacatcctcatctctgagtaacaataggaacacttcaccagcagtacgagtcctgaaacccgccctgtgttgcttgccttgtcttgccttttgacattgggctcacctccagtgtttctagctgttggctgtgggctcctcatcaccttcgtgagctggtggcacatgggcaggcatgaataaataagtgccttagggacacatgcacaaagaagtgtgtgtgtgtgtatcaaatgcattgcccacatggaggctgaaggcagagtcttgagagaggaggcgatcagaggcctaacccagccttgggagtgagtgggtgatgacagaggacatggagggaaggaaagtcacaggccaaatagggaaggaaggccatgggggagccagtggccatcgtctttctcttgagctcctgtagccacagtgtgaagggaagagctgtatgtgtaagacgccttccatgtgcccctcatgcccgcagtgtacacgggctgggggtgggtcatcctgacgttgcccgctcaggggtggccttcacgtttgcttcaccgcctttcattctctgctgtccttctgtgttgtcatggaaggagtcacgctctgtccttggagcctcgtgcgcagcccatgcagtccctgtggggctggggtagagatgagggaggagggataccctgtagcaaatgggatccggtcatgtggcccaggccaatgtcatcatcctccccagcagggacttagatccatgttttcccaatagctttatttgctgggtggagaaagtctggaggaacttttgaatagggagttgagtacattttgagtaggttgtgaaagttaggaaagactgtctcacccccagtcctgttgaagccccgtgcatcacgcaagggctggggaatctgattccgtactggcccccaccttcagaagcctccggctccgggcacacgctgggaagtggatgccactgccagggagggaacttgcagaaccgaaggcctctttttgcctggtttcctgttgggagaagagcaagttctacagtatttctggagagtgcttgggttttactgcgcaggctggggtgagtcttggtcttagtggggatggccaaggttcgtgaaactcctgcccctcgctcttcactctggaggtcagacttgctgctgcctgcctgtcgtggcagggaagagcgtggacccagcagccttggctcacagcgagtgctgaccctaagccattattactcggcaccttggcaatccatctggtactgatggcctcaaagagggaagcagaaggtgcatcttgcaagtgcatgaaagccagtggcgggaaaggggcctgggcccggggggtggggtggcttctggcctctgcatctctgtgtggcttgtctctgcatgcagcttttgactcatctccagccacaattcctgagcgtcagcctgtggcctctgttctcattctaccttctggtgctgtccttttatttggattatagttccactagcctggaagtattttcagggcaagaattatgccacatttccttctggggtccggaataccatcacctggtacatacaggacacatgcacgtattccttcacagaaaagatgcagcccggaatccatcctgaagcatttggcagctttggctcacatattcagacctctgtgaaaggctctgctgagacatcttcggcgggagcggagccatccttgtaaaaggaacctgagaaacagaagcccagggatgagcccatgtggatccctggccagttttacagggagaaggaccctgagagacgccagggagactgaggtagcaaaggcgcccaaaacctagaaggccaggaagcgagagaagagcgcagaaagttctaacattatgttctcaaaggtagtaacacgggaacagggcagtgaggtgtggccaacaccggggacctcttgggtctgaggcagggagaaaggtgcaggtggagatgtcccagggacagggggacaggtggcagtggctggactctgagggctaagggctggtgcacatgtgggatactccagtctctgtttgaacccttgagagcaggagagagcccccaggggagtgggggcggtgcagaggggtggaggaggagctctgcagagctgccttctgatgcagttggaggccttgggaggcccagagccaggcaagggagatgaggaagtggataggcgtgtgcccccgtgtttgcctgtagacaccccttgcatcctcacttgatcccttgatgctctgctgggccctgatggtgccctcctggcttccaaaggccccctgccatctttacattccatcagtgttctggacctggagcagatgactcacaatctttccctgccagcttgcagagacttccggagttttcactcatctagtttgtcctttcccatcttgggtgcctcagcccactgtttttccctccaactcactttgtgtagattctccatgatccttcctggagagccccttgaggcaccaggagagctgtgcgtgccagccatgcctctcagcctcatcataacaaacgtcacagggaaacaagctcccttcagaccctgtttaaaggcgtttaaaggcggtaagtgcctgtcagtcttggaggatagtgactcactgcctgaaaaccttcacagaagtgacaagacacttttcttcggggaatgttgatattgagtttcctcccctgtgtaaacacatctccaggagtggcattaataatggggaccctttccccaggacaaagcagaggatggggggagaaggaagaggagaatggacccgcctgctgggaaggggggagagctggccatataagcagctgttcctggtgaagggggagcccattagccagacccttttttcatttgttttcagggattttgcttataatctttatggggaccgccaactttttatttgacagttgataaggagaggcactagagtctagtaagtggttaaagaagctggagtcaggcacctgatttaaaattcctgctagcctgggtgcggtggctcacacctgtaatcccagcgctttgggaggctgaggcaggcagatcgcttgagctcaggagttcgagaccagactgggcaacatgatgaaaccctgtctctactaaaaatacaaaaaattcgcccagtatggtagtgtctgtctgtggccccagctagggaggctgcggtgggacgatcacttgagcctgggaggtggagactgcggtgagccgtgatctagcctgggtgacagagtgagactctgtctcaaaaaaaaaaagtaaaaaaaatccagctttaccccgtataatgtcacccagttttcatgcccataaaattggaatggaaactactccatagaggctaagaaatattattcataaagcatagtactcggcatgtagtaagtgtctataaatgttagtctgcatttacttatttatttatttagagatggagtttcacgcttgttgcccaggctggagtgcagtggtgcaatctcagctcactgcaacctctacctcccaggttcaagcgattctcctgcctcagcctcccgagcagctgggattacaggcgcctaccaccacaccagctaatcttgtattttcagtagagatggggtttcatcatgttggccaagctggtctcaaattccttatgtcaggtgatccaccgcccttgacctcccaaagtgttgggattacaggcgtgagcctctgcacccagccaaatattagtcattaagccaaccattaataaatgctattatcattaaaggaaatattgaaaatagtatcttttttgttttatttttggttttgtttttgaaacagggttttgctctgatgctcaggctggagtgcggtgctgtgatcatagctcactgcagccttgaacttctgggctcaagcactccgccttcctcagccttctaagtagctgggactacaggtgtgcaccaccatacccagcttttttttttttaattatcattttactttctgtaggggcagggtcttgctctgttgcccaggctggagtacagtggcatggtcatggctcactgtagccttcaactcttgggctcaagcaatcctccttcctcagcctccaaaaatggtgagattatgggtttgagccactgtgcccagccctggattcaataccataaagggttagattgcacaggaggctgccaagttgaattaagtggggttttatattagtgagaatttgccttccttctcagtattaatctacatttaggtcatagaccccatatccaacttactgtctataatttctcttacataggggggcacatttagataagcacagactaattggggttatagtcatagctttagaatagtttaaagacctagctgacggccaggcgtggtggctcacgcctgtaatcccagtacttcgggaggtcgaggtgggaggatcacttgaggtcaggaattcgagaccagccgggccaacatggtgaaaccccttctctactaaaaatagaaaaattagccatgtgtggtgacaggtgcctataatcccaactactcaggaggctgaagcaggagaatcacttgaacctggttgcagtgagccatgatcgtgccactgcactccagcctgggtgacagagcaagaaaaaaaagatctagctgagggagttgggaccagatgattttctccagtgatgtttgaacaaaaagaaaaaatgcagctgggcgcggtggctcatgcctgtaatcccagcactttgggaggccagggtgaacggatcacgaggtcaggagttcaagactagcctggccaacatagtgaaaccccatctctattaaaaatacaaaaaattagccaggcgtggtggcatgcacctataatcccagctacttgggaggctgaggcaggagaatcatttgaacccaggacacagaggttgctgtgccactgcactccagcctgggcaacagtgcgagactgtgtctcaaaaaaaaaaaaaatgcagaagctacttaggttgaacacagaaaggaagaaggactgtgtagttcagtagtgtgtgttctgagaaagccctcacagcgttggtctctagtaatctctggaaataagtgaatcattccagcttgaattatcatgatgcaaaattgtgttcgctgaaaagcaggggttaagtccgctgccttgtgaatttccgcctggaaatgcatctgacccatggtggttgctcaattctgagtgagtttggagaaggaaggaaaatgaggagttacttattagttagtcgttatacatttttggtttttaaacccaatatataattcctggatattcctaccacttactatttgttgtcgttgtttctattgtttttgagagaaggtcttgctccattgcccaggctggagtgcagtggcgtgatcatggctcactgcagtctttacctccagggttcaaggaatcctcacacctcagcctcctgagtagctggaattactaccatgcccagctaacgtctatattttttggaggtagggttttgccatgttgcccaggctggtcttgaactcatgagctcaagtgatactcctgcctcagcctcccaatgtgctgggattacaggcataagccatcgtgcctggcctcagtgagtggttttgtgggctggagtaaggatccagctgtcttcgctgcaggagtgacagggacgtggtgtccatctcagaggagccaagtgggcttgcctaggctttcgattcttgtgaagatgagtgaactgaaaccagacacctcttagatctatgggcccttctacctctgatgatctgtgagattcagtgaaggtgaacagtcactgtcggggatgttttaatgattttactaaaaatcggaatagaatgtgaaacagggggatctgaagagtgattatttgtactgttctggtcaggagctgggagctttgtctggcctccacgtaggggcctgaggacaagaactaggcagaggtgcagacagcgaagaggaggatggctcctgggtgttcaggccatggccagcctggtcagcagagcagctgtgggaaaagggatgatatttggtggtagcactgaggcccagccaacactgagcgcttaggatgtttcctgctgccctggcattgttttgttatttattccagcgactgtcctgtgggcaggaactgtaatgtccatgggcaggagaagaaacccaggtcacagggacctgcccaaggccacagaaggcccgaggctggcgggacctaggtcagcctgacttccccggccagtgccctctctgtttgtctcgtgtcatctgccttgggagctcacatttcagggcatgtggcccagtgcccactgaggtgcagcccgcgtgcctggacggctctgtcagggcgagcttctcgggcagtcttccttccctctccatttgttgctgcaggattctcctttggtcctgacttttctggtttttcatttccttacctgtaatctgttcactcttggtcagcaagagaataatattgcagctaccactgcctctgagtttcctcctggaagactgagtcttatgaagacccggttttgaggagtttcctggctggatcagcaaaaccacagtgatccacatttgattgatgtattttgagtttacatttattcccaatgtttattttcttgtaaaaatgagcgcattattgattaaaagagagagacacaatatccaaaaggtggaagtagcctaggtgtccatccgtggatgaatgaatgaacaaatgtggtctgtgtgctcagtggagtattactcagccttaaaaaggaagtcttgcactgctacaacagatgaatcctgaagacattacgctaagtgaaacaagccagtcaccaaaggacaaacactctatgatcccacttctgtggggcccccagagccgtcaaattcatgacgacagaaagcagaagaggggttgccaggtggtggggccaggatcggggtgcgggaggatggggagttagagtttaatgggtgcagagtttcagttttgcacgatgaaaacagttgtagagattagtttcacaacagtgtgaacacatttactatcactgaactgtacacttaaaaatggttaagatggctaattttatatgtattttatcacaatttaaagaagagaaaaatggagaggcagtgtacaagcttagtaagtagaaagtaaattgtgaaaacctttttcctaacacttcattctatttgcttctttggccaaaggtgtaagtagcattgatggacgattaggtagaactagccatccagaattggttctacaagattgcctttctggctcttcagtgtttctctttgcccaagcctcagtgttatcctgctatcacagcagggctgatcactaaggagaaggttatccttggtgaggaggtggaaaatggtgatttttaaatgttgtactacaagcaaccgagttttgatctgcaaatctatcatatttataatctgcattaaaattttaagtcacattcataaaatataggagtggatgcacttttaaaatttctttggaatgcaaatcagattggattaaagctattaaccatgtgtaataaaagactgtagattttgtagcagcttcatgctctacctaagatgtctgccaagtaagtgaaatgtatttgtaaaaaggcagatggaactactagacgtattgtcatcgaactattctccaggggcactgatttcagtgcaggtgctttagatgggaggaaggctgagagcagggtctgtggggcccctattgcagagaagctccgtttcatctactttatatttgatttgtaaatgtttgatttgcttggctaaagaattctgaggctagagcaacaaaacaaaacagaaggagagaggttgggaagaaaacgtgaagtaacaccaaaaaactaactgctattgcaaaacaaggataaaatagataattcaagatagatgtgattgattgccataaagattcatgaacacgtcaggtgaacccgagtctggaggctagaggaagaggagccgacggaatttgaggaggatgtgtgtctggtctgaagaggaggtagagacttcctgcgaaggctagcagagtaaaggtttgctttctccctttcctccccgaagaccagcacatcagatgaaaagaaccccccaaatcaagtaaaacttttatctgcagtgaaattaagagataactcatatccccaactatagaaaactgccgaatataatataaatccagaccacatggagggaaagacttcgagagctggtccatacctctcagctctcctgcctgttcgcctcccaaatgcccaacctccaaataccatcacatgtgggttagggttgccaggagtaaatttccttgttaataaaatgaatgagataggaaagaaagcggcaatgttttcattatttgcagataaaatactggtcaacttcactaaacaaatgtaaattccctgtggagggagctataaagctttactgaagggcataaaagaagacatgaataaatggagaaagatactagatccttggattggaaaagttggcagcattctttattccaaactccctcaaacaaatctataaatttaacacagtctcaggaaacatcccagcaagatttcttaaatacaacgtgtccagctgattataaaatttatatgaaagagttattgtacaagaatagccaagataattttttaaaaggagacttaagaaaggggaacttgccttatcagaaatcaaaacaaactagagacacactggcacggaagctaaagcagtgatgttcattgcagccctgttgtgtgtagcagtgaaaaattacttgctgaaatgcagccaaggtattaggaatggggaggctgtggcataaaaagattggcattagcattgaatcctttcaaatatcatgtacagctaaacagctgtgagaattatggagtagaatgtaagtgttatgtgccttaacaatgccaaactaataaatcctcttcgaagagagaagtagatctgtgctgatatggaaaaatgtctaaacagatatgcgtccctgcagaaacagctgcagaggagtatccatggtatgatcccacgtgtgttcagcacactgctctgttctttcctgtactgagggagcccatttctggtgaggattatttccaccaccccgatgacacaggcttggctatgagacttgctttgatcaagaatatgtgactcgaagtcactatgcaacttccacacagaggcattaagagccattacgtggttctgtcattactttttgccccctgccacgaggctggcatgaaccacatagaggttttgccttcggcctgcatgtccaattgaagcatacatatagaatttcggccaacttgcagctgacatgtaatgtgaacagcaaacaaataactatttgtttgttacagcataacagcttaaacagcaccaaaccaagcataagtgttttatacatatacatttgaacatggctaaaatatatctcctatatcctagatacacttttctcatgtgtataaacagacatgtacaaggatgcctgatgaagcattgctattacagcaaaaaactgaaaacaatctgaatatatatcagtaagtgtcttagccagtttaggttgctgtaacagaataccatagaatgtgtggctttaacaacgcttatttctcaaagttctggaagccaggaagcccaagatcacggcactggcagattggtgtctggtgagagacccaagcctgctttgcagaagaccatcatctcactgcatccactcatggggtgggtgtagggagatatctattctgtcttttcttttcttttttttgaggcagagttttgctcttgttgcccaggctggaatgcaatggcgcaacctcggctcactgcaacctccgcctcctgggttcaggcaattctcctgcctcagcctcctgagttgctgggattacaggcatgcaccaccatgctcggctaatttttgtatctttagtagagatgggggggtttcaccatgttggtcagtctggtctcgaactcttgacctcaggtgatccccctgcctcggcctccgaaagggctgggattacaagagtgagccaccgtgcccagcctctgtctcttcttataagggtactaatcccattcatgagggctccgtccgatggcctgttcacctcccaaatgcccaacctccaaataccatcacatgtgggttaggattgcaagatctaaatttgggttattcacagacgtttagtccataaccataaagaaatgaacaagtaaaatgtgatttattaatataatggaaaactgtaaatcaactcaaataaagcagatccacatgtataattaaaactgggaaacataataggcaaaaaagagactggaattgtgggttacacagaggcatctactgtatctgcaatgttgtatttctttaaaaacatctgaaggaaatatggtaaaacaaagatttgaaaaagctggtggtgggtttaagagtgtttgctatatatttttttctcagtgactgaaatatttcatattttttaaagaaagcattcatgtaaatctttaaaattgcaaagcaatgcttatgttcttcagaggaacatttatccctgtgtgtagaagtatatagattaattggaaggatatacactaaattcaatatagtgattggatagcagatggtgggggaataaacagaattgttacagtgtcctttgtgtttttatgtaattttaaaatttctaaaaataaaaatgttaattaatgcagtggaagatatctggaaaaacaggaaaattgttagccacctctgcccctggagatgggatcatggtgatggtggagactttttgtttgtttgtttgtttctttctttctttcttttttgagacggagttttgctcttattgcccaggctggagtgcaatggtgcaatctcggctcactgcaacctcctccttccgggttcaagcgattcttctgcttcagcctccccagtagctgggattacaggcatgtgccaccacgctggctaattttgtatttttagtagagatggggtttctccatgttggtcaggctggtctcgaactcccgacctaaggtcatccgcccgcctcggcctcccaaaatgctgggattacaggcgtgagccaccgcgcctagctgagaccttttgtttctacgtgacattcttctgtaccgtttgcctgtttgaaaaaaaaaatttttttttgagatagggttttgctttgtcacccaggttggagtgtggtggtgcgatcataactcgcttgcaggcctgaagtcccaggctcaagtgatcctcctacctcagcctctggagtagctgagactacaggcgagggccaccaagcccagctaattattattttatttaagagatgtggtgttactatgttgcccaggctggtattgaactcctgagctcaagccatactccgacctcacaaagggctgggattacaggccagagccaccatgcctggcctgtttgaatttttgtagcaattaaaaattgcgtaatttaaacacaaattgaaggggacagggactaaaaacataaatgagagttagaatgcagtgccacgttgaatgctttcacaggtaggagcctagaaatcatctgttccaactactgcacttttgagttgtggagaccagaccaagagaggtgaaatgactgttggctaaggcgtccacctctacttgcgtctggaattgcccctgcctctgcctttaagtctggtctgcgtggcttctgatagcgaagccaggggcggaccccgttcactgcatcaggagagccctgagcagcgcttggcaggaactctgcagcccagggcgccctctagaggctggaggaccttcgtcaagaccccggggggtgtggatgtggacctggaggagtggtgggcagaaggcggagccaccctttcacccagtcaattgcattcctctgtctttaatgttgggcttcctcagattagattttctttgaagaaagagttctgcagcttaaaaaaaaagtgacagaagaatcactggtgcagagtaaggtatagcgttagcatttgatctgatattatctagattcttttcacactaggaagcacctaagtcatctggtctaacaccttccttttacaaagaagatctgaggcctatataggcaaaatgtgtgctgcccaggtccacgactgcagggcattgtctcctggccctggtaatgtggtcttcattcttattttttgttttgttttgtgttaactgaacttagaactaaacagatcccttgcaacttggcttagactccatatttcatgcaaaaagctttcagggtagcagggtgactcggtggattagcaggagaagaagatgtaaagtgatggcgattggagcttaacctcggtttgattaagtaatcccccagacacccccgagaggggaaaacagtccccacgtataaatttctacacccttgctcgcctcctcttctgaaaggcgtaaatctcccctgaaatgcctccctagcattcagggcaataaagaggtcacattatatctccataaatctcccagctggctgctgctgctgccattccagaggcgaaggggaagttgtttcctcctgacggcaggccatgggcctggaaggaaaagcctctccctgcagacccattgtctcggtccctgagggagctgccctggcaatttattcaatattccctttccgtcctgccagctcctaactggggttgcagagtcaaatggcccagactagcccagcttaagtctcctctggccaaagctccattgcaatcttcctaataaataaaagaaaccaggaccatatcacagcattagaagccaggccagggttccctggggctgaggctggggctcgctgggacaggagctagggtgctgtgaaagatgacagcgggtcaacagcttcaggagtgcagcaaagctgaggacccacttgggaaatgggttccattttcccattagggaattaagatgcttttgtaggaaaggaaggtgggagaaaagatgcttttatggaaaaatctgaaaatggaacctgcccagctttaaattaaaaatgttactgcatgaaagagtgatgatgctagcccctgacatatttatgtattttatttaacatgcaaaataatcataggacagctatggtggcgcacgcctgtaatcccagtgctttgggagcccgagcctggcggatcacctaggctcaggagttcaagaccaccctgaccaacatggtgaaaccctgtctctgctaaaaatacaaaaattagccaggcgtgatggtatatacctgtaatcccagcttttggggaggctgaggcaggagaattgcttgagcctgggaggtggaggttgcagtgagccaagatcatgccattgcactctagcctgggtgacagagcaagactctgtctcaaaaaaaaaaaaaaaaaatcactatcacaaataagaaatacattaacataaacatagttgagtatttaaaaggtacacaacagcaaacaatgagaagtccttccgtgagccaccaagacacctccctggaaacaaccagcatgatcagtttcttgtctgtcctcctaaaaatgttcattctgtatataaacaaatccatgtatagattcttctccccttctttttgtaagagaatatcaatgtaatgtccatgccttctaatatttcatagcatatactgcaagaattccatatcagtacatcaagatcattgtttatggctacatagtgtgccttaattgaattaaccagtccggtattgatgaacgtaagagttgtttttccagtcctctgctatggaaggacatgccatagtgaatatccttgtatataaaccattttacacagaagtacatctggaggataaattcctggaagtggagtttctggatcaagtgacacatgcatttatacttttgataagatattgccaaattgctttccccactggctgcggggctgtagcatgtcacacttcccatcaatgcccagggtgtctgctttcccacatcccccaaccccagggcacagtactatgactgaggcaagctgggaggagcctggagaggggcatcatcacaacacagtgacttggaggatccaggaccagtgccagactttgtccacagcgtgactggaaagctcttcatgtacattctaccctggctgggactgtaccccgaagggagggcctctccctttctttctgtagagtgggaggaacagttggtgccacagcgatgcctgagcccagatggggatgccactgtggtgggaggcagctgggaccgaggtggaaaaagtactttgtactttttctttccggccaggaggatcccaggaaattgaagaaaataaacatctccaatcctgcagtgcctaggcagagatgcttgcttaattaactgcatatttaactaatttaaaccatgttacaggaagagaaaatctgaagaacatagtctatccaattgtcatgtaataaaccaactccaatttccgtatggctttggtgaaactttgtttttgtactcattcctctaccattgggcgttttggttgtttccagtatttggcaggaatacctgaaaaatagatattttccctttaaaaaagtttattccagtgaattattagagcagttttattgctagcaagagtgggctggcttttagtgcaacgtggtgtgattttccatatacatccatcatatatgattttatatacacacatgtatgtgtacacacacacacacggaaacttctggccctgcatagataattctcacagctgaattatattgtgtgtccaggaacatggcatctcagtggccgggcagcccagctggccggaagccgagccctgggagtgacgctgtcccatcgtcatttcggccgcctcatgggactctctaggcactgggtttgttgaaactcgatggctctgtgtgcagagcttctgtcgtgtgcggagcttctgtcgtgtgcggaggagtttctgtcgtgtgcggaaggcgaggactgggagctcagatgaggcacttgcccggcctgctctgcaccttggttttctcttatggatattcacgaaatagcccagacccagcttgcaggttttaagactgtaccactgtgccacctgccccttgctcctggaccctcgcagcctctcccacagaaggactggggatgtgcagagagagccgactcaacaaggcagtggacagggaagcagcggcgggggcacccttcgcatgcagtccccagaggccaggaaggagcaaatattttcaagtgctgatccccagccagggctcccctggttgtatctgagcctgaagccggaagccccaggagctgcaggacccagtgcccaatgcgttgtcctggcctctttcctggcatgctgcgtgtggcttttctggaagggggcaagtcagccgtactacctgtcagccgggacactagggagacacagagaggagggatcagcatgtcacggatgcaggtctcacagtgaggtctgcagagggtggccacacaccctggtgtgaagactgtgctttcagaataattagtaatatgccccctcccctcagaagtgtcccattttgtatggtaggtcacagggctcccatattaatccggggaggcggacggcacaaagaggagaaccttgtcccaggtttcggggtggggactgctgggcagggtccctgcaaacacagcagctgggaggcccaggcccctccactctgggactgatcgtagcttcccacatggaggcccccatgaaaactccatagttctttcacctgagggtgacagctggcaagacagtctttgtaaaaaatgtattggtataggggcaaaatgctgccattcgggagagttttcaaatagaaatgtagagctcactgcagtctttcagtattgccttcttttctttgttccttttccgtttttttttttggagacacggtctcactctgtcgcccagactgtagtacagtggcatgatcacggctcactgcaacctctgcctcctgggttcgagcaattctcctgcctcagcctcccgagtagctggaattacaggcgtgcaccaacatgcccacctactttttatatttttagtagagacaggctttcaccatgttggccaggctggccttgaactcctgacctcaagtgttccatccgcttcggcctcccaaagtgctgcgattacaggcatgagccaccacacctgaccctttgcctgtttttaaaatggtatcccagcctgcggttctctggtgggaaggggccatggtgaccattttctgggagtctgcatgtttagtgtcgagatgcagcaaatgaagtcttattcaccaccatacttttgtttcacttgtttcaagaaagtgcttgtggccagaagtggtggctcatgcctgtaataccaatactttgggaggctgaggcgggaggattgcttgaactcaggagttcaagatcagcctgggcaacatagtgagaccccatctctacaaaatgctagaaaaattagctgagcgtggtggtgtgcaactgtagtcccagctactcaggaggttcaggcaggaggatcgcctggggccgcgaagtcaaggctgcaattagctatgactgagctgctggactccagcctgggtgacagagcaagaccccattgaaaaaaacaaacaaacaaaaaaagtccctgtgagagcaatgcaacagtccacaagttcgcggacttagctctatggcattgtgattgcagaggctcagatttgaattcagaagcatcctacatttctcctggagccagcaactgatcctgcattttatggggaaatctttatgctgtaattataggcccacatggaggggttctcgaaggtctcaaaatctaatcttgacaatgatgaaggccaggaagcgtttcccaagtgggtgagctgagaagcattgagacagagatgttgggaagtttctgagatcagacaagatgggaaaacagcatgcttgcgctctgaactcctgcagcccttgctgctctcaggccaaattgagactgattttccatctgctgccagcttttgccgctggggaaggggtcagggatggccaaggcatctgtgggcagcgctggtgggacgctggcctgcggttaagagactgactgcccagcctgggttcgatcccactttgctgttgattagctctgtggccctgggcaggatctgttctctaaagctcatgaactttcctccattgccatcctctcctggaccagcctcccacgctcaccctactatgagcacagaccaggcaggtgtggaggtgctgggagttcttagacctccagggaggagccgctggggcccagggtgtcaggggcttgagtctttccacagttcctccagtgacaggtgtggttgcctgttacagccttcacgctcatctttctctttgtcatttgtaaaacctctttgcatatgagcgggtgtattttcccctatcatttgttcttcaacctcttcctcctctatctctctacgttcccccctccctccgttcttgtttttggtgttttgttttttttttttcctttccctttccctttcacaatgtccttgcctgtttgtgatttaggaaaaacaaaacaaaacaaaactgagtcacattctgtcactccagccagctgacgtcctgggttcttgtcctttataagggtcagaagcagaggccttggactctgtggggtgactgcaaggtgggcggtaactggtaaccgcctctgttcagcagctgcaggagcttccaaaataggtgatttcatccccggccggagcgccgctggagctgtgtgggcctccccgtgacagcctcctgtcacaggcatctgccgagcctgacgaagcccagaagacccagggctcaagagctgccaggaaaacctcaggctttgtttgggcctcgtgccccacacccaggcgccagccgcagggacagatccgggcctgtcgggaaatccaggctccatctctggtgaactctggatgggacatgggcctggggttcagcaagggacatttgggtggggctgagactttgctctgaagcccctttggttcccagggaacggtttctgggcaggtccctcccctcctgcccagtctgggctggggtctggccttttccaagaaagccttctgtgttgtatctccttggccccctctggcccctcttgtgtagcactgcccagctgccccgggcacgggccctttccactgttgacgtgtctctccctgaacgtccaggatgctgaagatctgaagctggaggtggtgggctgggcaccactgtgaggcccaggcccactgccgtttgtcatcacaaaggtagtgattatttttgagttgtgcatccccagctagaccaaaacaactttgggcaaggagttagcatggattttgccaacatgttcgttacgtctagcacttggacaggggcgcgtatacagacgcatggcagatatttgagtttcaggcattgctgtgaaggggctgagacccatcaactctgcctccaggcatgagggtgagggtcttccaacacaggctggggctcaacaccagctctccccagcaggtggaagtctgaggggagcatctgcaggagagcagaccaggctctgtggcgccgatggggcggcagcagtggcctgagctgtctccccagcggccagcagtgcccaggggagggagtggagagcggaaccgtgaccctggcctctgattcctctccctttcttcctcccgtgccttccctctccccgccctgactggcctccccttgttggggtgggtgggttccccaagatggatggagcaggtcagaggagaggagaggtcggtgtctttgcctctggctgcgtcagttctttgtagggaagtcaggggtgggatgtttcaacctcctggcctgcattcttctttcaggcactagggtgggagcagcttgtttaattgataggaatatccatactgcaccggctcgctgagaaatcagactatcagactttgtttcctctttaaaaaaaactttttttagcaaggtatgggaggaagtgaagagtgagatccccatccttggagttaggacaaaatttattttgtgcttttcattgctaaactaatcattaattaatacttcccatgagaagcaacttggagactgagtacaagtgaacgcggtcagccttgctgtcagttggttcctggcttgcagtctcaaacctgaccgctgagagcacagacaattctgagtatagccccagtggtttaagaaaggtcagattccccagtctcctagctcttttatctgtcctcccctcctccaataaccagcgccaaagtttgtcctggtctttcccactccctcctgacccctccaacttcagcctcctaacaataatccatcattgttatctcatttgatgtttgcaaagcactttacagccattgttgtaagtttttcctctcatttgcaaagtactttacaactattattacaagtctttcctccaaacgtgggtgatgccttccaagtggctggaggagttcccgggatgccagcactgggtgggaggggctgcatccgaggccacagctgtgccccctggcttcggaatcactcttgcccccagggaagttcctctcagtgcctttcgtaggaaggaatgagaagtggtgcttaccgaggttcataccagatgtcagtgctagtttgggacttagttagtgctgtgtttgtgatttaacattgtagggccaacgttttcctctatggttaccttgttttggtaataattgtttaaaaatatgtgtaacatttcatggagcaggttggatggcaggattttgtggttggaaatatggaaacttctgccgatttggaggtgtaggaggttgactattggatgtctttaggaagcatagcctttactttggctgttttggtaacccctgacccttctatcgcaatgggacttctatgctggtgggaattccacactttctgccctagacaattagggtctgccatgagtcccccactctgctgagggtgtgttctaaaaatgaactaatattattagtcattattgatattcaaatccaatttgtccaaatagatcattagcactctgagacctgggttccctcctagctcctgtgacatctatcagagtgattaaatagcagatgctcagtaaatatttgttggtggcaaatacatacttggcaacctccagtgactttacctggacagtaaaataattgcttgaatgcataacccaactttgaggtgagcctgcaggagctgctgaggcacacctgtgtgttgggctctcaaggcagccagaggtgagtcggcagctgagatcacgctccagggattcctgcgtcctttaataagattctggggtgggcacagttctggggtggacatggtggctcacgcccataatcccagaactttggaaggctgaggtgggaggatcgcttgagcttaggagttcaagaccagtctgtacaacacagtgagagcttgtctctaccaaaaaaaaaaaaaaaaaaaaaaaaattagcaaggcatggcagcatgcacctgtagtcccagatacttgggaggctgaggtgggaggattgcttgagcctaggaggttgaggctgcagtgagccgagatcgcagcactgtactccagcctgggggacagagtgagaccctgtctcacaaaaagtttttctttacatcagtgtagtgtgggaaaaagaaaaaaaagactccattcctgcatataaaacaataattgtgaggagaaaagagaatctcccctccgaacaagaggaacacattatgagatgtttttcacttaaatgaaccagaatgtaggagagaggccagtttgcttatttttaggagtgtgactctatctgttagaggaacatactgagatatttatgaataaaataatagaagtctgggattttcttcagtaacacaatgtgggggaaagtgaatggaggtacaggtaagacaagattgaccacaaatgattggaagctggatgatagttaagagttcgttttcatattctgtccccttctgaatatgtttaaattttttcataataaagaaaaatagggctgggtgcagtggcttatgcctgtaatcccagcattttgggaggccgaggcaggaggatcacttgaacccaggaatttgagaccagcctgggcaacacagtgaaaccttgtctctacaaaaattagctggggatggtagcgtgtgcctgtggtcccaggttctaaggaagctagaggttgcaatgcccactgcactgcagcctgggtgacagagtgagactctgtctcaaaaaaaaaaggaaaaaaaaagatagaaaaagtaaaatagactgaggcaggagtatctcttgaggccaggagttggtggctgcagtgagctgtgattgcaccactacactccggcttgggtgagagtgaacccggtctctaaagagcaaaataaaataaaaaaggaaaccagaatgggagggttgcactaggtttggaatggaaaggtgatcttacaaggcctctatgtccaagtgcgattcaggctagaccgcgtgtcttggttcaattttgagatggtagcgccacccagtgtttattgcgaacacccaacaaaacgacgacgttgcccgcgcccgcctcttgctgtggagtgggcttggtctaatgtccttctgtaaattcctggcctctttaatcccctcatgggcaggcctggatgaaagaagcggggctgacagcccataggcacggactgtagaggtggcaacagtagtgttgattgtggtggtccagctgggagcaagctatgggcgggagtggccgcatctcatgggcggctctgagggcaggcgaccttggtggaggctgtcagtgtgacccaggtgtaaaaatagcctctgctgtgacgcctgtgctccgctccctggcctgagcaaatagccccttacacctgcacactgtttacttggtgtggacacacagctacctgtttgcaggtgcaaatgactgtttgtgtacccagagttgtggggagggccccccaccatcctcttctctggcccacattcccctagagcaagtagctgggccacataactagcaaaatgcgcaacctcaacccactcccgagctgggtcctgttggaaagagagctctttaccacctgtcctcccaactcaataaaagcacccctcttcactagagaaaaatctgcccttgcctctggcagcagcataggaagaatctggagaccaaggtagatgtgttttgggacagcaaattaggataacatgaagtcagagagacttctggagatggtgagccaggctttatagagactacggggagcaagaaaactggcccagcctgtctcacgagggtgaggagaatggacacaggtggaatctgtcaattgtaacattctgtagacatggatgataaaggtgatggcggggaggggtgagcgagtgaagggagcggcagaccccggcagccttgtggtagctggggagatgctacgcttatgtgagcagctctaaagtgccattgcttataatatgcacctttattttatataccaataagcaagaaaaatgtccaactatgatatggcagcccatacaggtatattaaaacagaaaaaatgaatgaatgaagctttttttgcaggacagttagcaaattccaagaactgaaaaagaaatttagtgcctttgactcagaaattctacttctcagagagtatcttaaggaataactagaaatgcacagacttaagtaaggagcagtgtttatgaaacaagaatccaaaactggatgaagattaatagctgaatgatactagttaaatgatggcacctttatatgatggaacaatggtatatgagtgtataaagaattttataaaatgagtttataaagaatttgtcattgggaaaatgttttggtattaagcaaacgacccacacagactcagaattatatagcttggcaaaaatatggatcaacatatgaaagtctcacaaggccgggtgtggtgtactcacccagtactttgggaggctgaggcgggtggaccatttgaggtcaggagtttgagaccagcctgatgaaaccccgtctctactaaaagcacaaaattagccgtgtgtggtggcgcatgcctgtaatcctagctacttcggaggctgaggcaggagaatcgcgtgaacgtgggaggcagaggttgcagtgagctgagatcgcaccattgcactctagcctgggcaacaagagtgaaactccgtctcaaaaagagaaaagaagtctcacaaagggctgggcacagtggctcatgcatgtagtctcagcactttgggaggctgaggctggagtatcgcttgagcccaggggttcaaggctggactgagttatgactgcaccactgtactccagcctgggtgacagagtgaccctgtctctaataaaaagaataaaataaatacagtcttacaaaggatacaatagaaccaaatgctcaaaacattagtgacaatctggattttctttatatattttggcactaattttcctaaggtaaatatttattatatctttatgcaaaaggaaaagtaatcttactaactttgaaagggaaaaagagagagcaaggtttgcgtggacctcagtgtgaggtgagaggcctagggctggaggctctgaatgtgatacctgcactgaaatccaggtgtcccgcctcccagcccaggacgtgggtgatcactgcaactttttcctcttctcgtgctcaggggaactctcagtgtctgggattagggagcaggggctgaagtcagagtgaggaagagcaagagcagcccgaggtggtcttctctttccaaggaaagggcattgtttctgtgcgctctagattctcagatgtgagagctgggcataaacaaagaattaatcctctgtgtcttttcttgtctgttccccccaactcagtagatatgtttgacgacttctcagaaggcagagagtgtgtcaactgtggggctatgtccaccccgctctggaggcgagatgggacgggtcactatctgtgcaacgcctgcggcctctaccacaagatgaacggcatcaaccggccgctcatcaagcctcagcgccggctggtaagcacgtgcctcgcagcctcctctgggcacctggctgcggagctctcgccttggtgggacatcctctggttttgaattttggaacttgagggtgtgcatcggggattacgtgggtgagagccccataataattctcacaactttagagttagctggagccaccagaatgatccaggctgtctagttcaacctcttcggcacacagaaactgaaagtgaggctcagaaaagctagtggccttgcccacagccactcaggtactgagtctcccatctagaactctggaaccagaatccaggtttcctggttcccagtccagtgttgactggagtgtctcctccacccacaccaaccctgcaaggaaggtcacctcagaggctggtctctaccctgacctcagttgatcagttgataaatcccaaagcccagaagtgcaagcagcttgtgttgggccccgtggctagggaagagtttgggcctggggcttggctcctggcttcctgctcctttttaatataatttgattctggtcaacaccaaccagcttgcactatattaaggagggaagaacagaggggataaacctggtgcctccctttcttgaggtcccagggccattcagactttgataccatttggacaccgtgattcctcactctctgcctgcccccggcacctgcagccccggtcagttctcctctcaggagaagctttcctgccggcagtgcccggcgctcactggttattcgcctgacggtgaatgatggttaggactggaaaccaggtctcgatgcccacgttcgctctcctcgggcagcagaaaccttgttctgatttattcctcgcagtggcgcaggtgacaggagagttaggtgccgtcacaggtcagagatctcatgcagggtcgttagggcccagccctgcctcccgttagggaggcccagctccgcagccacacgcgaggtggaagggcagtgcacaccttttacttggacatgaagcatttgtttcctgtcttgcagtccgcctcccgccgagtgggcctctcctgtgccaactgccagaccaccaccaccacgctgtggcgccgcaatgcggagggcgagcctgtgtgcaatgcctgcggcctctacatgaagctccacggggtacgtgggtcctgcgcccatgcggcatccttgccttctgatgcccatctctcagtcctcccttgtcttcttcctttgtactagcattcatttttccttcttaacaaagagacttagatttggaaggggctttcaactactttgctggcctcttccgtcctttacattgtataagtgaattttccgttttacagatgagcaggctacatttatatgtagcagtttgatgtgtaacaaaggtgacgtttcgattcagtggataagaagcttaaggatagttgtattgacaaaattggctgttcatttggaaaacagaaggaaagcatgacctctacctcctaccttaaacaaaaataaacttgggtgaattaaggatattacatgtaaaacatctttgaaataaactaaaagtaaggccaggcatcatgactcatgcctgtaattgcagcactttgggaggctgaggcagaaggattgcatgagctcaggatttcaaaaccaacctggacaacatggtgaaactttgtctctactaaaaaaaaaaaaaaaaaaaaaaaaaatctagctgggcatggtggtgcatgcctctagtcccagctactcaggagtctgaggtaggaggatggcttgagctcaggagtttgaggctgcagtgagctctgattgtcccactgcactccagcctgagtgacaaagtgagaccctgtctccaaaaaaataaaaatattagataataaaatactgcaaagaaaatcagacaataaaaacactggaagaaaatgtaagggaaagtatttatataactttggggatgggagaacttcttaaacaagattttaaaactttttagccatataagaatagttagatatatttgattttgtaaatatttactgtttgtgcctggaaatgatacctagggaaagtaaagaccaatacacacagtatcagaaaaagggttaatatttccagaattacaaggagcttctacaaagctctttaatttttattggaacattctccattatacaatattaacaaaaaggcaaggtgcccaacactacctactatggcactatttttataaatatgaggaagaatataatttataggtggttgcttccacatatacagaacacctctggtaggatatgtagagattggtcacatggtcacatgtatgcatatatacgtacatggggtgcctccaggagaaaaactggggtcctggggagaagggattggaaggacactctttttgctgtgtacccccttggtaccttagacgggacatatgcaagtcttaattgttcaaatacaagttaaattaaaaccaaaccaaaccagaaacagataggtcttgtagcctaataagaaaagaacaattgatctttccccacttcccccaaatgggcaaaagatatggactgacatctcacagaagctgcccagatagccatgaaacatgtgcacatatgctgaatctcactaaaaatcagagaaatgtacctgaaaatgaccatgaaagtccctagtttgcccatatacttggcaaaaattaaagtgtttgctgctatggatttggggaattagatactctcatatattattgatctgtatttgaattactgcatctattaacttagtggtattttttaaggttgaaaccatgaacaccattatatctggcaggtctactgttgggaaactagcctataaaaaataaccagtacatgatgacctttgaaccatttattgctgcattgtttgtggtggcaaaaactagaaacaaccttaaaaccccataaaggaatggttgaaaaaattctgctatatcccaaaatgtggaatattgagaagaaacttaaaaataataatctagggccatgtatcttgatctagaaaatgaaaaagcacattgcaaagaaatatatgtagcatgaccccatactatgagtgtcgaaggtgcattaaacagacatacatatggatgggtggacagaccagtggatgggtgaacacacacacacaaatatacacgtataggtgtattagtctgttttcacactgctgataaagacatacccaaaattaaaaagtggcttaatggactcacagttccacatcgctggggaggcctcacaatcatggcggaaggtgaaaggcacgtcttacatggcagcaggcaagagagaatgagagccaagcaaaaggggtttccccttataaaaccatcagctctcatgagacttactcactatagtgagaacagtatgggagaaaccgcccctgtgactcagttatctcccatcaggtcggtcccacaacatgtgggaattatgggagctacaattcaagatgagattttggtggggacacagccaaaccaagtcaatagatatatatgtgtacagatgtttgagaatttttttaaatgtaagaatatataacaggctgttaaatccatttgcctcactgggataggattgacggtagtagagtgagagggctgttgttaacttagtctcatgtatcttttcatgatttcttgttataatgaacaagcaaatggctaaagttatgaacattcataagaaaatatttctacaaagcatgtatacaaggatgtttgttaatcactgtaatagcaaaaatggaggaaagaaaacctttggaaggaaaatggttaaactattgttcttcaatatgggaatggtacaagaaacttattgggaaatattatataggtattaaaaagattatattctcagaaaataaaaaaatagaattaccacatgatccagcgtaccatttctggatatatacccaaaataattaaaggcagggcctcaaagagctatttgtacactgctgtttatagcagcatgattcacaattgcagaaagatgtaaacaacccaagtgtccacggagaaatgaacggataaacacagtgtgatatacatacacgtaggatattactcagcctttaaaaggaagggaattctggcccctgacaccacatgtcaaatccatagagacagaaagtagaatggaggctgtcgggggctagggaaagggggaatgaggagtgatgtttaatgggtatggagtttgagttttgcaagacgagaagagttctggggatggtggtcaggcttgcagaacggtgtgaatgcgcttaacactacagagcaatatacttcagaatggttcagatggtaaattttaagttaggtgtgtttcattttactgcaactgaaaaaaaaaaagcatacctaagtgaatggagattaacgtgagggggagattcttctgaggccagaatgggtttgaacatttgaggcatagctagggggatggggtgggggaggacacccttccacaaggtgggaaataggggtctgggtgtagagtcacagagagatgtgcagatggtggggtcggggggtgcaagtgccaccccatctacccacagttaaataggaggccagttcaagttcacatatgctggtgcatttctcgcttaaccattgcgtgttcatgtctctgaagcagtaattgcttttctttctgtatttgcaggtgtggcctttatcaatcccacatggtagacaagcacagcatagaaaaggggctaaaagatttggctcagcctaagagaaaccagatgtggggaaggcaccctgcagtcctgctccccaggactggcttaggcatctgtgaatggctctggggcctgcctcccaacagaactgtggtcaaagtgttgtccagggacattttatctcagaacctggtcacagggcagtctctagcatagtctcttactgctccccaccattcacagaagcaccaatggctccagccagacccaatgcagtacagagctgcaataagtagagtgatgttacatctcaactcactgggactgttgctgttgaggccaattttcccagcacaataattgatagcaccgctgcaccctcacaccttttgaagatagggccttgctccaccacccaggctggagtgcagtggcacgatcacggcttgctggagcctcgacttcctgggttcaagggatcctcctatctcagccttctgagtagctgggactacaggcatgcagcaccgtgcccagctaattttaaaacttttttgtagagatggggtctcactatgttgccaaggatggtctcgaactcctgggctcaagcagtcctcccacctcggccacccaaagtgctgggattacaggcatgagccactgtgcctggcctagcacccactttttgttttcagggtccttgtgtggatgataaaggcttttgaacagtctgtctctgctgcctgaaatgcctgcctctgtctactcaaaaccttttacaaactcaggtgtcacctccacactgaagccttccttgatatcctcacgtgcccctccttcccactcctcaccccaggacagagtttagtgtttctctgtctttttacatcaccgaccagagtctggttatttctccttgtctgtgaatttctgagggtaggagctgtgtgtctttagttccctattctccaggctctagtaaagtagccatcacatcacacaggtgctcgataagttttttaaaaatggaattgatttctttctcgctgagttccaggggcctgtgcagcccgtctgggccccaggctttgtggagagattgcttaggtgttgccttctcgcagcaggtgtgtgtctttcaatgctgtagcagactacgcagaaatggaaaaccctatatatttacttgtgaccctccaggtccccaggcctcttgcaatgcggaaagaggggatccaaaccagaaaacggaagcccaagaacctgaataaatctaagacaccagcaggtgaggaaaagatctgtgagtgattatatgagtacatcaggagccctcagagtgcctaagaatcatatcttccgggttaggcaggccagcccgggccgccagggggtggtgacagcatcggacatccctggcctttcaggacaggatgaagagcccagcaaaaaagtaacaattgccatggaacgtgttgggagctttcgaagcaggctcaactcaagctggggcctgatcattgccgactgcaaagacccagtgctcaggctggaccagccgaggtcctgcaggaaagaggaactttactcggtcctttcatctttggcgctgcagccacccaaaagctcagttcctttcaattctctttgggctaacggggatccaggagggcagggtccaattaatcatgtccctaacagattgatctctaagccaatgtataattaacatcatgcagtgctttgtgctttagaaagccccttcagaaatattatctccatgaaagtaagactccatgagaaccagtttatgaccccattttactaacaagcaaactgaggctcatagaggacaatgatttaacgagggtcatacagctgttaatgggtagagaattaaaacccaagtttttctgcttctgggtcaatgttctcttcaatataccactctgccttcttaatttctagattaagaataagggctgctcaaaagtttgaggctgcagtgacctatgatcgtgccactgcacttcagcctggagagcagagcaagaccctgtctttaaaaaaaaaaaaaagaaatacatttaaaaagaacgagggctgttcttttttaaatttatttttaataaatatattaactatttattaaatttaaattagatttatttataaaattatatataaatttctgacagaacaacggctgttctttaatacgtttatgttccctaccaaaacattcctcactcagtactgctacccagttaaagatttgactggtcggtgctgcagtcacagagaaaatgaattggctgatctgacgaaaaatttatcttctaacctaaggcatgacagagtcagataaatgggccctttccactaccaagaacatgatcaaagttctgcttttgtacattcaaccatggcttatcccttctggcaggcatatttcctactggaattttcagtgtctcacacctgtggtcttccacctctcctcctgcttccctactgctgacgagtcccctatgtcccctgggtaaccttatttcctctcacgtagcaatcacagatagagaagacatacggttcaggcgcacgattcccagtccaaaattccaaatccaggaagcaagattcggcagcaaaacctattttgaacagacactaggctgttgatagtctctgtttactccattcagtatgatattcacgtgttttgctgtggggatattattgtatttcattatagagtattatctcaggccctgctggaggtattctgtaataatacacagtatttggatttttaaaaatgtgaatcttcaagttgaatgaggaagaatctttttttaaaaagttttgaagcctgaaacacacgtggcctcaagggtttgagatgagatagggggaagaagccatccctgtgagaactgtagccctccgcagataaggacctctgctgctgtccccggcaaatgtagataaagccattagcttgcacccatcccggctgtctcgcaggctgccggctgttcgtttgtccctgccgctgatttgggtgtgctgactctgcttcattccagctccttcaggcagtgagagccttcctcccgccagcggtgcttccagcaactccagcaacgccaccaccagcagcagcgaggagatgcgtcccatcaagacggagcctggcctgtcatctcactacgggcacagcagctccgtgtcccaggtacgcgccatggctggggcgccagggctgtttgtggggaggccgactgcagagtcccagaggccagcctagtactgggtgggacttgcagccaggcctcacaggtgcaagcagtgagctaccctctgcgctaggaagacccagccattgagctgtgtggtgccctcagggccgcacgaggctaggggcatctgcatcgggctgtatttcaggacatcttatcaagatggtgatgtggacatgactgtgactcacaattttttaacagctcctctatgccatcatctttggaaacaaagagaggggagtccagggctggcatacagcatgggtggcaggggcggaaaacaacacagaagtacaacctgaatgagactgcgtgctggggcgaggggaggcgtggttgcgctgtcggaggccgagcggaggttctctaggcaagtctgcctcctacgtgcagggaggttagacttcaacagggagggtggggaaggaggaggaagctggcatggggaaaggcctggatcctgcagagggcaggcagggcaggctggtggggaggtcacaggcaggatgccactttcatgagacccagctctgcacgtgtgtcaggggacgccctggggcagcccatgttccctctggcggaggacgatggcgtctcggcctccctgcctcctcccctctgcagttccctctcttgggaccaggatgcaccaagcttgatcacggtctcctttgaccagccctggctgttatctcgtctctgctcttaactgaaggaggccgtgtcttagtgagcttcttattgtctgggagaacctgatcccacagaaccaggggcaccaggagccccttctgggccgggtggatggcttctttgttggaaagtggatgtggtggtgataggatggtagaaagtgtctcctgtaaccatcagagccttctgggcaaccacagtatccacagggccaccgggtcatagccctggttgtatactgtgctcagaagcagctgatgcatcacccagacccttcatgcctagatcaccgggatcaggagaaacagagagaagtgctccttggtcccttcctgagggctgaagccatcctggggacatctgcatagcagggcaccctccccagcctagacctcccaagccctcaggagcgtctccatgggcctcatcgtgtgctttctgcttttcagacgttctcagtcagtgcgatgtctggccatgggccctccatccaccctgtcctctcggccctgaagctctccccacaaggctatgcgtctcccgtcagccagtctccacagaccagctccaagcaggactcttggaacagcctggtcttggccgacagtcacggggacataatcactgcgtaatcttccctcttccctcctcaaattcctgcacggacctgggacttggaggatagcaaagaaggaggccctgggctcccaggggccggcctcctctgcctggtaatgactccagaacaacaactgggaagaaacttgaagtcgacaatctggttaggggaagcgggtgttggattttctcagatgcctttacacgctgatgggactggagggagcccacccttcagcacgagcacactgcatctctcctgtgagttggagacttctttcccaagatgtccttgtcccctgcgttccccactgtggcctagaccgtgggttttgcattgtgtttctagcaccgaggatctgagaacaagcggagggccgggccctgggacccctgctccagcccgaatgacggcatctgtttgccatgtacctggatgcgacgggcccctggggacaggcccttgccccatccatccgcttgaggcatggcaccgccctgcatccctaataccaaatctgactccaaaattgtggggtgtgacatacaagtgactgaacacttcctggggagctacaggggcacttaacccaccacagcacagcctcatcaaaatgcagctggcaacttctcccccaggtgccttccccctgctgccggcctttgctccttcacttccaacatctctcaaaataaaaatccctcttcccgctctgagcgattcagctctgcccgcagcttgtacatgtctctcccctggcaaaacaagagctgggtagtttagccaaacggcaccccctcgagttcactgcagacccttcgttcaccgtgtcacacatagaggggttctgagtaagaacaaaacgttctgctgctcaagccagtctggcaagcactcagcccagcctcgaggtccttctggggagagtgtaagtggacagagtcctggtcagggggcaggagtgtcccaagggctggcccacctgctgtctgtctgctcctcctagcccttggtcagatggcagccagagtccctcaggacctgcagcctcgccccggcagaagtcttttgtccaggaggcaaaaagccagagattctgcaacacgaattcgaagcaaacaaacacaacacaacagaattcctggaaagaagacgactgctaagacacggcaggggggcctggagggagcctccgactctgagctgctccgggatctgccgcgttctcctctgcacattgctgtttctgcccctgatgctggagctcaaggagactccttcctctttctcagcagagctgtagctgactgtggcattactacgcctccccacacgcccagacccctcactccaaaatcctactggctgtagcagagaatacctttgaaccaagattctgttttaatcatcatttacattgttttcttccaaaggccccctcgtataccctccctaacccacaaacctgttaacattgtcttaaggtgaaatggctggaaaatcagtatttaactaataaatttatctgtattcctcttt

SEQ ID NO: 74 - DNA, 72800 bp, Mus musculus strain C57BL/6J
agggagttgggagacgtagctcacaacgtctccctcccacccggctcaaacaggctggaatctctgggcctagaggctgatctgtccctgaaagctggcctccaacaagcttggaagagcttccacctagggtgagtcacctccaaatggccctcctgtcaggaggccaggagaaacagccaggggatggaagccacaggagcactgtgcatggtggagaggaacctgggaaagagggaacagaaaggcttccagggcgcccacccaggctttgtgggataggtgctgggggctcttcagcctctgcctagaggaaagagaacagattatttctaggacaacctgctgaggttctctctctctctctctctctctctctctctctctctcttcttccacctcttctgttattctttcttacagttggctggcattttagtttctctatttcctggttcattgcctgattcctgtagttggaaactaatggcaatggttggtcgccaccccacccaaaaaaaccaggggagtggatgcaggctgaccacagaagccaagcagattgaagcaggtgccactgggcctttgctccctccagcaaacccagatcggttcgctggggtcccctatggtcacccgtgtcctctggaggactcaggcaagtcctttccagccaggccacagttcactctggaagcgttgggccaggaagtgtgcagccgatccccaccgggctgtattggttagttgtgaatggttctttcgggatttgcgcctcctttctttgctcaagcagggcaagggtcagccagctgctgtgtgggtttgattttcattgattccagggtcgtgtctagctgggtagagatgggtcctgtaggtgtatggaagcaagcataaagcatgctttccgttcactctatgtgaggagaagcctggggctgtgtggacttttgcagctgagtcaaacctacctctctttccttctcaagacagaggtggtgggtgccaaactttgaatcctattatcctaggaaagagctgaataaggggagtcaagacagcagtggtctctttgagaacaggacttggaataaggaagccggaggccttggaagaactgcaaacaactcaggtccttccaggctggcagcgttgctgtccagacctcctctacttgctcaaaggctgacaacagacatctgggcatttttgatactggtacatcttctggcactgggtaggctttggtgtccaagtgtctagattcccttgtaccggtgcaggacacattgcctctgcaaagtagagattatattcccctgcagtcagtccctctaccccggaagctagcatggacttccagcagtaaactcaaaagctacctggaaatttacccttcccctctaccctgtactgtcagcacaccacttatttcctcctattctcattccccagtactctcaaaaaaattttttttaattaaaaaaaaataaagcgaaaaaggcataaaaaaatacatataccgattaaaggaaaaccttactgtaaggcttgtataacttatggtcacttgtgtccattgtccacattgttggtattgctgtttagtagttgcaaatggttagtttctgctatctttattttgataaatcagtctagggcagatggtatttgaaagctcccctttgtgagcttgtgttttacgggctcattgccacgggtttcgctcttctaggaacatgttctgaacatgttttttgtagttttgtatcgcatttagtgggatcttaaaaacagtgttctgtgattggcacgaaagaaatcctcaagagctggtcccgttgtgtctctcggggccaatcaaatacccatttccaacggctttctaatgcctggttctgtttgcacaggaagggaagtcacggtttgcacccgtgaagtctggggaggttcagagctgggaactgcccagaggaaggggttcggggctacagccatcaatctccagttgtttaaacataacgctaagtggagactcgaggcaattatccgaataatgggggaggggcactttcacctgcattatccggatcgaaagtgcggtgtggtgacaaatccggggctttttaggccctggtggttctcagcggtcttgggaatttgaacggcttttctgtcggttctgcaaaggaaattaagggagatttctagaaaggcttgacaggctatcctgcaagggggtggggggaaggctggggggcgccgcgggactcccggatcttgggtgataaaggcagggggcagatctaagatcaacaaacctagcggcgtcaggcttgggcagagggtaagaaagttcagagatgggcgccggggagaaccacaatccaatcggtcggtcaaaagaaaaagaggtgggggcgtcaagcagggagggagtaggggcgcggccgagagtcttcttgcctgtagaccgagggcccccaagtgtctggcggcgggaggtggggatagaaacaccaccaccagttaagtttctcaggggacagaaagtggcactctttaaaggggtggatgcaatgtgggtaaggaggtggggactctaaataacacgacctcagaaaaagcctctgtactgcccaacgagacagaactgtctccaagtgagagaagttacaaatgaagacagtattattaatgttgtctagttaaatccttgatgtgtgtcgctaggtagctcacaaactcctcttgcgtccttgattggcttgttttcctctctccccgaacgaggaggagaaagatgggagaaatatgcccaaagtctagccaaaaagctgagactagtcgctgagtgactcctctacagattaagtctcctcgaggccccgcgatccgggcagcagcagattgcgcggattgcctgcggagcctgggcttcgcggacctcctcacactgaatctgagttgtggtggccgggcggcccggtggagcaaagtgacaaaggcttgagcagggtccctttctcaaggctgggaatgtccccgcaaacgggttcgctaccactttacgtgcccagctcaccacttagctctgggtagaaaattcgataccagattgctcctttcaaccctggtggcccaagtctctttggggagggggtggagatggcgaatggatgggtcgtggctgaagaataatagctagtccgcttccttgctcgcagggttgatgggctcggacgcttggtctacgggcaagaaagtttcagccgagaccactcttgtgacctacctgggccatcgtgctttgcgcctgaaactccttggcagaacaaagcccatgagtcggatgacctgggaccgtaagaagagcggtctgccttctctgccttctcttctacctgctgccctctcttgcacctctccaggtgtcctaagtggtacccaagaactcctctccagggcagtttccttttcccgcttggggtttaataataaagacactgaggcttctgtatagtataatgctgttggcctgtttgccggggcagtccctccgctagctcaccagactcaacccgacttcctccgccaccgtggctctccacgtggctctctgctctacttctctgccctgctcccgaactcgtaggaaacttggtacccatttcttcctactttgcgtccgccctaaaaaaattcccagccagagttgctcggtggtagcccgcttccacagaaaggaaggagagaagcgtaggtttaggggtgatttaggtcagtgtagtagctttccaagctttccctcaaatgtgcccccaacttctcaatacccctatggaaaaacattcagtggaagggacttagccaccccagatccatgacgctatacacataatcattcaggtctttctatggccgagattagtgcaatattgagagagtcacgattaacaccttaatactaggtaaggtaaggagccggttgatgagtggccagagaaactgggactaaggaaaatttcttccttcatctgcgttcttggttccggcctcctgcaaatcagaaatgtctttgaagatgtatatttcttgaacttcggggagtctggcttgtctagaagagcggagtgacttggcatccgcgtgccgacattcagggaaggacactgtccctccattcgcaacccgattcttaacaaaactccgatcttggtaaaatttcgatcttaataaaatttctggcagagtctcacagtgccgagcatagtgaaaaactagagtggtggctgcaaacacacacacacacacacacacacacacacacacacacacacacacacacacagagttacccctaagcagctacatcactgaagtacagtgaaggcttgagtggacgccggcgctggtccctggacccaatgctgttgtttcattggataccgggaaagggtgcttctgccctctgcgcatcctccaccccccccaccccacccccgtcagtcagtcttaggagcgtctttattcattctgtacaatctacttagcctggttttctcctttctctccccatctctccttcttcctctccctcctcttctctctctttctctctctcctactcaccacccgtccctcctttcttccccatcccctcttctaactcagctcaagaattttcctcctctggtttaatcgaaattgtctccttcatttgattccctttcctccagttttgctccttaactcgtttactgcctgccagttaccttcaaatacacattgcctgcctttacatctccctccggaaccgaccgggtcattccccttcctctgggacatcatccccgctctttacgataaatttgtcttgttcattttcatgtgttactccccttgcattggatgaatcaaaagctttcttatggttaattatcatctccatttcaatttctaaatatcaaactacatcgtagctaattcgttttctcttaaggagtttctgaggcttctcctcctgcccaaataactagaacactataataactttccgatggctcctcagtagtgttttttttttttttcaaaattgggtagtaatgtgtaaaaaaacgaggccagatgctttatcctgccaaggtatttattatggcttcccactaactccagagatttacaggaaaatgataggatgcaagtggataataacgacccttgttcaccagctaagattgtatttgctttctgttagagctctgtagctctatcataataatgatagaacaattagctgttccttgtagatacataatgattttgagtgcttcttatttgctttatgtgggatttgttgttagatcacacatgagcatttttatagaatagtcttgatagtagatgagttgtgctctcagaaagtgactggaggcagaaacattagcctctaagctgagaaacggaaaacattttctcttaagaatcaatcaaacaacaacaaaaaatcattaactcttaagagaaatctataacaaatttttatataaccaagatcattagccaagctcggcgcctccctcctttaatcccagccctgaggaggctgaggccacaggggcaccaggatttgaggccagccagtctgggttacagattaaagaccaccccaactccaaaacaaacaaaaaccagaaagaaaggaaggtagaaaggctgctggcgggttgaaatttgacgtagggaaatcagaaggggagccaagcatgaactcagaacactgtactctgctctctcatgatctgaaacagcaaaacggaaggaagttgaacccgactctggaattcttaaacactgttcaggcaaaacatgaagggttattggagggggcgatgtctcaaagtgtttctagacccttaacattgacaagcagaattgaagagttcttgtatttagacttactcctgaagtcccacagacagcaccaacccaccagaccaggaactactgggggccgggtggggagtgggagagacttggggtttaggggctgttctgggagcccaagtgaatgggccttggtgttctgcactctcttagcaatctctttgggtttttttgtttgtttgtttgtttgtttgtttttgtttttttttttttggtttttttttttttttttgtgccttcctggttcccttgtgttcgaccaccaccactcccgtcaccactactgcagggggtttacctctactgttgataaaggaagggctgctatctaatctggtccgcaccaagaacaatccattagccctcagtatttagcatttatccggggtgggggaggaggaaaagattatgctgcctcatcctactgcagcctgagttgtgcctctgaggagagaggaacgaatgaaactcaaaaactcaccaggaaatctgtgtcccctcgggctgataaattatattttcacccgttgctatacccctttgagttggaggggtggtttttcttttaaagaggtgtatatgctcttactttaggtgtgaaagattccatttttcacccaatgtcccttagggcggcagagatgggaatccgtccagtcattcattctttcgttcattcattcattcagcaaacatttgcaaagcttcactccacgccaagccttgtgccttgtactgacaggttaaattatttgcccaagatgagggttatgctgacaactggggcgggaccctaaatcaactattgtagtcctatgactgaccgcttctcttcccccaaggcacacaaatcggagccacggggagtgggaagggctccagaggttatcaggtccagccttccattcaattcaagaatcccctccccagaatgctagtgagcaggccgctgactctgccctccaccagctacgagagcagcttcctggggttccccttccagaaagtggtgtagcagtccaaggtcctcagctgcgccataatctaggcttgctcttgcctaagttcagagagccaaccctcgtctactgctgtggttctgtgtgcctggctcctccaagagccagaggttactaattctcccacgtaagcatccttgcttctcctctccagtcctggaagtggggattccagaattgatggcacttcccccccttgaaacctgaaagtgggaagggccttggccaagctgcttttccttagttgcccacaggggatgcatgttgcctggtcagagaaagccccaggcagtagccaaacaatgtccagaggctggattctagatccaatatagctcagtgacaggctaggtgacctcagagaggttatttttgtagcatattctagaaataagatgcatgcatgtgctcagtagctgagcttgccaccttttgcaaagataaaattgatctctagaagtagtctgagattacaaaaaaaaaaaaaaaaaaacccaatgtatagacaacaaagaacattctggaagcttttctaccactttactgactggttatcttaggcaaattacctttaaaaaaaaaaaaaagactgtgtttcagtttcctgtgttttaaagtcctcctaaaccggtctgcagacaagcctctgggtccccaaaatagtcaatagttaacacggtgacatggtaaaaagccttcagctagacattaatagcctcgttgatttttttctttctctctgtttttttcctctctaaacttatgacttacaaattcttcagatatcaaatatgttcaataagaagcagacaatatcctaagtccacgagcattatctttaactgtcttatccaaaattgggaattgagccctgtcagaggcagaccaggagctgtggctgtggtcttttgggtcagtctccatgcaaatccctgtgactctttgcttcgctgtttccacagaaagaaatgtacccaaaggaattgctgaggctcctataagaaaatgcatctataaccaaatctgaggacttgacaattacacttcagaagtgtggttagtgtaacaaaaattggtagcaacctagtaaacagctaggatttactattgttatgctttcttgacatatttaatgagatagcaaagtctcaaagtagccttttattttttatgtttttaaggtttttctgattgtttgctagccgtgatattccgagcctcctttgtgctaacaatgtgcttagcactgagtccaacttttaaattaacaaggattgagagccactctttaggaaataaaactcccctgagaagacaaaataaagcggttatgttcttcatggttcttttcataggtgtagttaagcgtccgggtttttttgttgttatccattctgtcttttcaaatgagctataaagtgaatgtgtttctttcaaattaaaaacaaacaagcaaacaattttttgaaagaaatggggagggctgatcagatcttgagtgggtctgcctccccaagatctttatggctgttttcaaggtaaaggctgtataggctcctaactcaatatgtatggtcagactgtacaacagctgcggggatacttcctgcctggggaggttgctgcctgaagccacgatttctatagagtgcctcccttcctcctgtggggagcttcaccaccctccaggcagtctaaaatctctactgcagccttgaatttctgaaactgaaagctctctgttctgcaacgcttcctccccactcacactcccttcgctggcagaaaggtttgggatttctgagccaggtgctgggctagctgggaagacaagttgattattccagcctgagaagaggaggagggtgcattgggggttaaaggaagtcagactttcagccatggccaagaggccagggatgttcagaaagaaagaccttggtaagaaacccagagaattctagccagaccttcagagaacaaaagcacttcaggataaactaagtgccaggtgcctttcttttctgacactggaaacatctcttagcaatttccagaggtcctctcactctgcaggcaaaatgtaggagggaagggggagatgctaacagaaagaatgagcagtgggcaatgcaaactgtacacaaacaaactgcaaagcagatctagcagcgctaaggagagcttccaatgagcttgctctgttacttgtgtcaaagcaacacttgcaaacgatgatacaagcagcaggtgctagccctttcctggttccttatttaacacattgcaacacacttgctgccctgaaataccacccggatcatctttctccaagtcctaaaggattttttttttttaattcaggatcagccttgattatcccagtgggtagatggttcctgcaaactgcaggattttaggtttctgtagtgtgatatcaaactccttctgtgttcacctcttccagtctctgctgaggtaagcaggacccagccaggcaccttagtcaccttcaagcttcctctctccacagcactggcgtggtggcaggtgctgtcttggagaaagagtctcacagggggtaggtccccatgctcttgttgacaacctgattctctcctgtatttatgaaaagaaccaaacccacagcaaggagctggccattgatataaccctgttatggcaaagctgcaacacaggcaaaggaaaccaagaagcaaaaagagcagggctgggttgtttctccctagcacttgaggaaagacaaaaccaaacctcattcctatagatgagagttgctgggtcagtgagttgtgtgaccctggctgcttttctcactcaggtatcatttggcatttccagaagtgtctcttcacatagctttttaatcaaccaaccataggcctcagagaaacttccttaggcgctcagttttgatttatgtgatataaaaataattttcacttgtaatccaaagggagcagaagacatcaaacagccctgctcctggttctgcttcaagtgctaggtaccagcccctcatctctgtattgagaacggactgaccggccttctggtgtatccaagcgctttcaggaatgtgttatatttgcccctcccaggagccctctggactaatcagttgtgagtattgctgtgatggtcgaggaaactgagttgtcctgccgaaggtcacatcactaataagtaacagaattaaactctaatgcctgctttaactaccccaagctgcctccccaccctcccgatgcccgagatcagatggcccttatcaacggctctgtaattgctctaataggggttatcaggatccctcattttgcctatcccaaaatcatggagttaaagaacagctctggattcttagggttcgtggagccccgccccgccccgcccctttcacaggtgtggcccagaggggttaacgtgaactgccaaaggtcagtcatgtataagtggagaatgaccaatgtcatttttaaaaattagttaaaagaactgcctaccaagcccatttttatggcttattttaagcaggttaatgagtataccaggcacagctttaactcccaactgagtaaatgctgacactagtttatagattgagcagataagtggcaataaggaattattcatcgctcatttatcatccagcctactgcaagtacaaggtataaagtgaagcaaataacaactttagagcccacacgtgtggagcagtcagagcagcaaagactccatgctctacaaagcttgtgcatgtgtctgagccccacgtcttctgagatgagaaaaaggaaaatattcagggaacatatgtgcatttcacaaacaggctgtgaacgttagacttttggagcgcacgtgccatgccacacatgtggagaggttggagtcaccttgaaggagtcagctcttgctttccactatgccggttctgggtatgcaactcagactaggaaatgcttttactaactcaactatctagccatcccaggcatatagagctcctatttggtcttcagtgaattcagtcactaatttgttcttctgagtgatattaagcacctactgctcccagagtacggtggggaattacattattaaacaccaactctttctgctacttttctagtttaatgaggtagaaagcatacacacacacacacacacacacacacacacctaaaaatctcaatcccatgagtctttgggatgacagcgtatatcatgggcagggtcagctggagtcagaagaaagtgtgcctgggaaggaatgggaagaaacagaaggctatctatcaagtctaggagagatacaaccttgttacaagtcctctgtccccaacagtgtgtatgagagggctgagtgacatcatagctagaaaagacactatgaattgatagcctcagccaagaccctaaccccaaaggccatgaaacaccagcagcctggtagatagctgatagaatctgtccattcattattatcacatttggggcatatgttgaaaaacgaataaatcaacagacaatgtgcttgtttggggaggcaggggtaagtgctaatgaatttgcatgtgctattcagaaagctagctagctttttttttaatttattaatattttatcagtccccgttcatcaatggtagacctcaggcacaaagttcaacatcaatagcagagcaacccacaaatctagtaagcaacttgctcccggcagccctaagaccctaccttgaggcaccaccacgtggttcactgtccagtgtctggcccgtgtcttcaggcacatgaccactgactctactggaaagagaactgggaagatatttactcaaaactccagactcattcggctcagcaaattcaagcaacgtatgcagagcgtgagaataggagtgtgtgctggtggtgctacacaggacagcaggtatccattggccctgtctcgggtaacacagtccattgtgttgcctatgggtcaataacagaagcagaagaaatgtccagatgcctgggtactagtgacctcccaggacccttcttattcattgtgagcactggaatatatacaaatccacaggactgttaggaaggtaacctggaaatacaatactggaccaattttggaatggtttgtccttggtccaagatggccataggatgtccatgtgcctttaccaaatcatcaagtctccacctgcctacacccatgcctagctgggcagatcactaacccagctctctataaggggtgaaagctaaaccaggttccctggcctgcagacccccatctcagaggctgattgctagccctcctcccctggagatcacattaaagtgaagaatatttacccttgagatgcagcagtgaaaagcaggttgatgacccctggaaacccctagtcttggccagctacagtactaggtatgacactcaaaactcagtgactcacgaaagcctgtaaccctttgggtgctaattacatcatttgtattgccccagcaatgacaaaaaggctggcccagaactgatatgtgggccaaaggtacctgaggtcatggtcaccactaacagggactctgcttatggtattgatgaagcatcacatggcattgtccctaattgagcctctctgagctggcatacagtggaaaagaccattaggcagatgtctctgctatacccctgacagtgtgtaaaaggaagatttacatagtatagggatgggttgaaacttccaattttctgaattaatcaattcagggttgcttggatccaagggaggttggcttcaaattcactataatagctgagggtgaccttgaactcctgatcttcctgcttcgatctcctaaatgtaggatcacagaccttcatccccacatacagtttgtgtggtgctgagaataaaaatcagggcttcatgcacactaggtaaacagccccaatttttaaattttaatttgatatttttgaggatttatttatttttattgcatgtgtgtaagtgttttgtttgcatgtatgtatgtgtaccatgtacatacctggtgccctgagaggtcagaagaggatgtgaaagtccctgagatttgagtgacagatggtagtgagccaccatgtaggtttgggaaatgtaacctgggtcttcagcaaaagcagccagtggtcttaactactgagtcatctctccagcctcttaatttaaatataaaaacatgaacaagaactattatatatgccatatctccagccccttaattaaatataaaaacatgaacaagaactattatatgttagaaactatgggattatttttcttacaaggaaactgacatttaggggagaagtgttcacatgcagttagttaggtgtggagaaaataaagaaataaagtatgctaaaggccgtggaagcagagacagaacagaaattgactctggaacagggatggtaattttaaaagggggatgaacaataagatcatgcttgcctgcttcccctttgtgtccctcacaatactgacacattgctcagaggaacagtgtctagacaccaggatccaagcacttgagtttcgatctttatcttgcatatgctcatactaggctagacaaggtactagatagcttctgctgtccctttctttgcctgtagaatgccaaagcaggctgtgcagagtgagctgtgtttgtctggcaacatgcagagaatatagcatacccatagtactcaatgaatgtttacccagggaatggttaaaagttcccatatgcagtccaagcttttcattgccactcaaatgggtctccaatgcacatttttgtcctttatttttattttatgtatatggatactttacctgcatgtatatatacacaacatatatgcaatgtcttgtaagagatccaaaagaggatgttggatcccctgggactggagttggttgtaggatttcttgtggatgctgggaattgaacccagctcctctggaagagtagccagtgctcttaaccaccaaggtatcttttcagccccctttcctttgtgtttgagacaagatctttctatgtagccctgactgtcctgaaactcacagaaatccccatgtctcagcctactgaatcccaggattaaaggcatgtactctgggcagtacttcccattttgagttctttgtagaagacatttattatctatggttaagactgactgagcccgccgggcctttaatctcagcactcggcagaggcagaggcactcgggagacagaggctggcggatttctgagttctgaggccagcctggtctacaaagtgagttccaggacagccagggctacacagattaaccctgtctcaaaaagcaaaaaaaacaaaaaacaaaaaacaaaaaacaaaaacaaaaaaaaagactgactgagcgccccaatggctgggggttcccactatgtgtgaggccaagatcatgtccctcctatagtcacttgactgcttgacaggatggtaaaacttggcaacatcagtttatagagctcaaagacacacacaaaatgttgctttgtaaagggatgctcaaaatgactttctatgactttcacactcatctggtgacctgaagcagacccaggaatctggactctcagactgccagttgtctcagccctactgtccttcagctaggctgaactcttccagagctctgggccacagcagttgagttatgaggaaggagttcttcctccctctttttcactggtcccagagaaaagcctattttctagttcttgcgtggcatggaaagttcccacaactgtctgggaattcaatgtcagggctactggagtggggcataagcctctaaatccctaccaccaccaccaccaccaccacacacacaaggtggggaggttccagcgctgagtttctccattagtttgcctcaagtgaaggtgctctggagtctcccattagtgtgcctcccccaccccgccccgttcccacagagaaggtacacctagggtggggtttggagactttccatagaaaacgctgcataagcagggcagtggtggtgcacgcctttaatcccagcacttgggaggcagcagaagcaggcggatttttctcgagaccagccttgtctacagagtgagttccaggaaactgaaaaaagaagaagaaaaaaacagaaaaagaaaacgctgcacaggtgaggctcgcaggagctggggcaactgtttctcccgtgggttggtcctcagatagcaaacagtcaggcagctttcttattcatctaaaaggccaagagaagaaaacactgggtctagccaagatggaggaaggcgcagcctgaggagattggaggttgggactgaggtgaggcccagtgcaccttttccatcttagtaacccaagtgagttaaggaacgcttgctctactggaaaccgagccggtaccaaagggaccttactgtcctcatctgcggaccggcttgtctttagttaccggccggcctatcttatctgtcatctgtgactgtatacacacgcaagaactgggctaaaatagtccaagagctgagcactccacgccgcggagtcagccttggccgggggtggcgctgcggagcggtaagagcggaggccagggcgcacggggccgggaaggaagcgcggccggcgagcggggcgccaggctcggccttctgcgcccccgagccgggccgggacgcgccagtagggcgctggcggcggccgggggctgacctcgagcgccggcgagtctgcgccctcccaccggcccgcgctcgcctcccgccgcctcgggttaggcggcggcggtcagtgcgcacctcatcaataagacctgacaggccgccggctccgcggccatccatcaagccgggtggcgagggcggcgagggcggcgggcacgcggggtgggagccgcagcctcccggaggctcgcgatgctcgcaccgctgggtggcgggcagcgctctgctctccagcagagtacgacacctcactcggctccccaggacttaaagatagatcagattacttagaaatggtcggtacaacccacacattgtgtgggtagggaaacaggccagactgggtgttggcacgcctggggcctcaaaactaactgtttggagaataagacttgagctgaaccgggcggtggtggcgcacgcctttaatcctagcacttgggaggcagaggcaggcggatttctgagttcgaggccagcctggtctacagagtgagttccaggacagccaaggctacagagaaaccctgtctcgaaaaacaaaacaaaaaacaaacaaacaaaaaaaaaacctacgcgccatccacgccggcacccggtacagtcaagagccacgtaggactagtggggcgggataagtcgaacctgtcaaacacattaagaataataggctccaggaacttgaggtgtaacttagctggtaaagagcttgcttggtgtgccagaagcattaggttctatccgcagcacccaggacactagtcatgatggcctgtgatccctccacttgggcagtagaggcaggaggatcagaatttcaaagccattctccattctcagctacatagttctaagctagcttgggctacatgagactcaatttcaagggggaataggaggctccttgaattgatttagcatttccagtttcactctccttttctaccaggaagggagcatgctagcccctcatagtttatctgttccttatgctgtttacagaactcatttctttactgaacaggccaatcagagaaacttaagtttggtttcacaccaacaaagttttcatcgcacctagcagacacttagcagttttcataagggaattgttatgaagcatatttgctggggggggggtggcatgggggtaggcggggacaatgacactctgactcaaagtctgtaaaaaccttgtaattcaacctcactccacctgattttttgggggggtgtggtgggggtagacggtttgagaccgggtttctctgtgtagccctggctgtcctggaactcactttgtagaccaggccggccttgaactcggaaatccacctgcctctacctcccaagtgctgggattaaaggcgtgagccaccactgcctggcttacagacctgattttttttttttttaaactcaggcctttctaaggcaggtggaagctgttttggcctggcagagatcccttcctttttctttccccaaagtgtgtctggaccaaggtgttccagctgcagaccccagcatctcactacttggttcttcctttcccacctcactcattattttcctactgtttcattagcaagcccccatacccaccctgcaaccacctcctcccacccccagtttggacaaagtaccccagcccagaaactgaccaagctagactgctttatttctaacaggaaataggatgttttgtgaagcttggaattgtcttgggtacaatttctcataaacatcacctgagtgtaatgacagtgtcagggcattggagcacaaggagaactttggtcttaggatatcatcttgggctcgaaaggctgaatttccagtggttttccttagcccactcagcacagctagcataaaacctgttattcccccaagctttgaacttggcttacacagaacttgactgcaccaaaaaaaaaaaaaaaaaaaaaaaacaccagtcttgctgactgtccaggcttcccagccccagtgtccttctcccaggtagcctagcagttgctgcctgaagacttcaaactaaggaagaccaaaagttacaggcttctcgggaggctagggtaggatcacatttgctcctttgtcaacctctatacagtttcctgtgaagtgtgtgtgatgttggcagcacactcaggatggagctctgtgaagccaggttgagcaatggctgagggacaaggctggagtctgcatctcttaaatagaagcccagagcttcctgggtatctaaatcaccctcctgagtgggagtcaaacatgtgtcggggtggtggaagctccctgcagtcttgagaaccaggcagagaagagggtgaggggactgaagaattttatcttgcctcaccaacatctttttttactgttagatttattgacatgtactttccaaattgtaaacctactccttttagtgtacagtcctacatctgttggcaaacaccaacacaatcaagatgtcaattgaataatcctaacactgctcctaaattcctgcacttgctcccacaccctcaaataactctgcctcatcctgtggtcctggcttcctctgatttgacttcagcactatggttgtgtctttttcaaaatgccatgtatagatggttcttaaacatggtcttttgaatctgaatcttcttccatggcactgatcacgttacatattattcattttcttgggtgttgttgaaattcattcatttttgttgctggccattattccatagtgtggttggacagtttatccgtctcccacttgagcttcctagtttagaataattatgaaagaacctatagggtttgtttgttttgttctgtttttaagatacctgtgatgccttttagtacatgagacaaaacatggagaacctaggcatgtggctcagcccgtattagagtactgccctagcatgtgtgaaaaccctgggttcaaacccagatcagaataaaactggatgtggtggtggtaattctaggactctaaaggtggaggcaggagtatctgaaattcaaagtcatccttcatcctcagctgcatggtaaatgtgaggcccccttgggccactctgatcttgtttaattttttttaattaaaattgccaggcctttagtgccaacactcttggaaggcagaggcaggcggatttgagttcgaagcaagccaaggcctacagaatgagttccagggtagccaaggctacacagagaaaccctgtctcgaaaacgaaacacaaataaataaataaataaataaataaataagcaaagctactccatcttacattgcaaatgtgagacctgttggacgaccttcaaaagaaagagcaagaaagacaccggccctaacaaagtagctggtggagtaagggcaggggacgctacttttttgaggaatcgatcgctcttgattgattggtggcataagttaccagttctgcgatcctccgccccactcactggaaagtagcgtggacatcaggaaataggcatctctggagacttcctggtggacgggttctgcccctctccccaaggaacagcactactctctgtgttgctggaagtggaaggagaagctgcttggttgaagcggggcacctttctacgggtacccatcaatccacttcattcgggggtttctttactcttccgttgttctcccttcaaatcctggggtcttagcaattcgttattcactagcatctctggggaagaactcagggtttaaagagagtgcaccctgtccctggtgtaaccaagtatgaggcttgtctgtcagagttgactcagttctgaaaactattatgtgtgctgtgatggcaacaggagtcctagtcgccaaggctccatgctccccttctgccttctgtggaaggaggtgcttgaaccaagggaggggaagaaacagccactccaaaggcacctgctacagtggtgggaattggataagcgtaggctttggtgctagtccttgactggaaggcagggccagacagggtggttagtcacttcgggaacagtgttacctccagcctccttcgctgccgcccaccctctcacccccatctccctccccaagctctagttcagacgctgtttttgcacttggtcttcgagcttccttgacattttcctgtctctctgggcacgccaagtcgcggcgcctacttgggcgtctctggctcggggtcacctctggctccgcgcgggtgaggtgaagggtgctagggtcgcaggctttctttccggccacctcggtgtgaggcagtaggcctcctatgcggaagcagggccaagctgacgcttagaacagtaggtctctggggtctctccgggtcgtccctgatgtgtgcgtgttcggagtccttcaggggaaagcgctggtgtctagttgtagagtcggaagagggaagcccagcagttctgtaaagccctgtgactgacggggacggtggtggggatccaaaagaggcaacccaccaagggctgctgctgggtagctctgacatctcagaaggctcaggccggtatagttctgttcgggaatggtctcctcctttggcacctagccctaatccttctgaccagttttgtgtgtctgaagcctccactctcaagccgacccccgcccccatctgccatttgacattctacctatttgatgtgttttcatctgtcttcattttatggaaagaagctggctagggcagcgccaagttttcacccttggaagttctgagcacctttctgccttcccccactcctggtctctatttctgtctctgttcctttctctcttcttgttttgctgtggttgttgttgttgttgtttgttgttgttgtttgagacagggtttctctgtatagtcctggctgtcctggaactcactctgtagaccaggctggcttcgaactcagaaatccgcctgcctctgcttcccaagtgctctctctctttcttcttgtgttcatgctctccactttccaattttctccggtcctgatgtctgacagtctcctgtcctcccaggatttaatagatctggaccctttgagaaatcagaatcatgccgcagtatcccttggtgggctgcctctctaagatccccaccacattccctgccattcacagcctcattggtactgagctagcttcgccagttaaacttgacttccagcatctggtctgcatccagacatccattcttcttgctcatctcgaacttttagcgttacctgagatatagcctagatgttgatgggcaatttgtagacagggatatgcacaagctggactggattagcactctgcagatctgtccctggccccagtgccttcctctgcgactagatggaaagattctcatagaccaaaactttttttaaaaaaagagctttgcgctctcccagcaacaccagaaattattattcctctattaacattcctcttgcctagtaatatgtgattttaaggaaggaaaaggcagagccaggggcatgtacagctctgtgagtttaagatcagcctggtctatatataacaggactctgcctcaaacaaaacaaataagcaaatctttcttgcaaattcaaccattcagcaaacactccttgaacacctactgtgcattagcctcagttttcacctcctcgagctttctggagggtgtggtgatgtgaaaattaatgccagcaaccacagacaaatgaatttctaacctcagggacaaaagacctaaggataaatcaaatggatgtttaatagggaattaattaatggcactctatctctgggcaactttaaaagaataaatgaggaaggagccccccccgcccccgcctgtgaacgaattgaatccagtgccagtccaccaggaatgatggcagaggtggctcattagatctgtaagagaccagcccctacagaaaatagtctcagagcagatgatcgagttcgtgtgggacctcacctccagaagagggcaactccctctctctgtagcttcctttacccgctttctggacgggcgcccttctctacagaagagtaagggagtcctttgggaagcaggaagcagagtgtctgtggagaaaggggtgccaatatcaggactgggctcctgggccacatggtgaccttgtcgagactggtactccggactgaagaccgtccctattcacaaagcctctgccatcattcataaacttagcaaaaaaaaaaaaaaaaatcttttttttacaaaaagctttttgaattttcttagattgtgaggcaccgttttgttctaaattgaaattgaatttttaaataaaagaaacaacatttagaggctaaaaaaaattaaaacgactgtaacagagaatattttacagctactattaggatattaagaaataaggtgagaatttggattggagacccgctgcctccacccacactttaccacgtagactctgagtcccaacctttctgtgtcattttaaagatgaagataatagctttgtcttcctcattcttcctttgcaatgtgtccccaaagaaaaattgtggggagcttttcaggcctcttctaggaatttgacagaaatttgaaggcaagttttatcaaaaaaaaaaaggtaaagtaggagagtgacctgtagtttagaagtgactatgaaatatgccaccaactggtctccagaccggtaacactgggaagcattttctcagatctatgaggaaggcaccccttcattttgcaacattgcacaattctttttttttttttttgtaacattgaacaattctttaaaagctaaactattaaagagggctattttcttttatggtgaaacctcaagatttgactctaggtgtggggctagttctgggatgtgtgggcacagagaattcacaaccatccctcttctgcctggaaccccaagagctgaaggtccagggctgggggaagaatgggtacatagacttggccttgcaggttctttgttttttgtttttgttttcttttttcttaaacaagatgtggtgtgtccagttgctctcttggaattttctgctttgagcagggtagtctcgagattcgggctgacagtcacagaggaaagggacgtggtgtctgtggtgtcaggctccgttgttaggacaggagaccgaattcgttcagtgcgggtcactttgtgcatctagcccaagtcctttgtagatccagaggcacggctgcacctgaggtatctgttctataagaccaagctggatttctgtatcttacctctggctcccttaccaaacactggaaactgcccaagctccaagctctagtttctttccggaactcgtttcttctctcactgtgcggcttgtgagttgattcccgttgaattcggaggggcatctgcctccagaaatgcggacattgtgacgaccaacattgaccaccgtttaaaccaaatcacagaggtcccagagggcacttgctggtgcccaattcctggggggggatctctcttggtctctgtgtgaaatccaacatctgctgtttgttttgtgtgtgtcgtcgtcaccctcccttcgaggaaattcaagtctcaattcctacgtacatcgtgttcatcctacagtttcgtttctgctagctaagaggccagcttaagtctcagaatccttcgtgaaacaagaaataaaatgtattcttttgtgctgcaaagattatttaggaatacggctcacctaaatcagtcttattacggaaagctacagacttaaggctggatcattagactctccaccttcactctgagcaaaaagatctaagaaggttgaaggtgagcctgccgcctctgcccagagaccatgggaaaggaaagtagaaaggggaacgtgagccgggttgagccacccccaccccatcctagtgacatagtccttaaaaatagccaagtctgatcctcagcgttgcccagcccccctcctctctttggcctccctagtctgagaggagccgataacccccctccatctccagccagcaaggccttgaaatgctccccgctcctggcaacgcacagaggtcgcctagttctggttccagcagaggaagggagcaactgaaggaccggaggcaaggggaggaaggagggagggaatgaagaaaaaaccaaaagcgcccaagaaacgcgtctggtttgactctcagcccacacaccgggaaaaatttgttgtgtgggacccaaagtgtgggggttaagtcacaggaagctgaaacaaatgtctctgtcccaggcgccttcagagtcagagatctgtctcgggcctcccgctcgcagcagtcagctcagcgggagatgcctggagactcctggaaaggaaaagcggtctgggatggtctttggctgatcttagcaagagcgaaggatcacccgattccctaagagacttcactgagtctctcaatcgcactgagcaaagtatccccagactatctggggtaccctcctttaaaccgttagaacttggttttcaggaaggctgttgggtgggtagaggtggggatggctaagacacaaggagaatgtcgcctggcagctgttggagaccttggcgacacagaggcgtatcacacatggctgttcccccagacacttaagccccgagcttcagacttcatgggtaacaaaaccaggaacgctaggtttggccccggagcttagcgcattttggtctatgagggacactacagtgaggcaaatctgagatctaaggcacacaagtcagagaaagagagaggggggggggagggggaggaggaagggagggagagagagggagagggagggatagagggagagaaagggggagaggagagagagagacagagagacagacacgcctcgttggcttgggctgtgggcctttggcttcgtttctcttctgctcaccaggtagttgagggtttcttgtaaaataaagcaagggccacgccattctctgcattcatccgagagtctcagaggagatgttgtgggagggttccttgatgctcagcgatggcctctgaaatcctcagaataccatccctaaaactttaccagatctcgaacctgcaggccctgattctgactggcattgtttaggattgggggggggggctggagaagggaccctaatcatggggccccagcttccggggcgcccaagggctcaaactggcggcacccggggctacttcggtaaatcaagccagagtgcgggcagctcagcacccctgacgggcctcagttttctctcctctagagccgctctggacctcgggccccttcggtttggaaaagagaattcccccggcgcagccgtgctcagtccttcctctgggattttcctgagatccccacgggttggccaaagtcccacgggttttccctttcaattggctcggcgtcccagcctgttcctagcgcctgggttgcttttgcactggcggggcaatagcaatagcaatctgcagtcagtcctcgaactgcgggagccggtgccatcccgagccttctcgggctgcacagggttcttaccaggtggtattccagccctctcctgacccctctaatcttgtattggaaaccggtgccggggagagaaatgagggcttaaaagaagaaaaaaaaaagtttagcccaaagcgcgagagccaccagagagctgttatctgcagctgaaggctgtggtaatcgatgggttatttttacgcggtaatagggccctgtgattgctctattaacctttagacctgtctgagggactctcccctcacagctccactgcgccagggcctacaggcactgacgccgactccaaactaaggtctggcaccctccctacccccaccctagggaaggaactacagtccttgaatgggctctaaggttagagaccaggctccccacccccacttcatccttttgattggaccccagtcggtgagggctacagggagtgatgagaagggacgggagaccgcaggagtgggaagaagtgtcggcggcgaggggtgcgcgttttgtataaatacataaactcctgggctggtggaggttctcggcgccttgcagtctccaccggctcgtgggaaggagaaaagagcgcttgcgtctctaggcactgaccttaagggccagttcaggttttagtgcctcctgaccctctcccgagctcacttcaagggccccgtagatctgaggctagcaaggcatcccgggtgacccagtgccccaccggcgaccatgagcccagtgtgcgaggtcaccttctcctctaccagccccgccccttgaacagggcgctggacgtggaccactgagagtagggaggaaagagaaggagaataaacacgatccttggcagagcagcaaaccgcaaggacgtcgggctgcactgagggcagaacggagcgcccggcactgagtgctttccttccccgagagttccgcgcgcatggactttgcctgttgggggagctttgggaagagtcctgcgggcgggcgccgggcggaggtgctgccgggtccgggctcccccgcccccgcccttgcacgtgactcccttaggccagtcagcgcaggcgatcgctacgcgggggcccggggaaccgcgccgggagcaggggacaagccggaggcccgcagagtggccgcccgaggctcagccgcagttgcagctccgcggactcacggagatcgcgccggttttctgggaaactggagctggccaggtagggttccccgagtccctgctcttttccggggcaggagaaactcacaagtccgccgccctagtttgcctggaatagggaggtaggtagctgggaaaggagacgccggtcactccagtgcccccagattggctaaaaactgctccgcttttgactttggcctagcgaggactattaaatcaagtgagactgattagcagcaaaaactgatgggtgctggagaggtgcgtttggattgtttgggagggaacatgaatccttttaatccgtcctgtttgcagattctccaactctgccttccatcccactggccagggcccgtgtaatctctctgaccgactgaccctggacaggccgcatagcccacactttggggtgcagataggatagtgtctccagcctgccacgcagggagtgcagagtggcagtggcaggcagccctgggacctgggggagggctggaggcccttggagataggctcggaaacttgcggatctcttctgctttctgtccaacctcctcaaactcctctagggctcaggaattgtgtgtgttatgcactgctgaatactacccacatacaccgctttcggggagaaagcgacccagggccaaaaccccggcggaaatcagggatagtcttgggtagtcggctcaagctcccctgattcacgtattctatcgcttggatgtgacccgggagagttggcagttgttactcttggggaagagatgtctgggtgatgaactttcaccaggtggaaggaaagaggggcttttcggttgaaaggaagaggatagtgagggacccgaggcagtaaaggatccggggaaataaggccgcgctgctgggaagcacctcgggaatttatttcctgtacctttggaaaaggaaggcagccaggaaggacgcttcggacattagaagaaagaaaggttacctggggagattacggagggttagtgtataagttggttagtgaccattctcagtgtggcggggaccggagagacccgcgggagcctaaaggaaagacctgtaaaaagacacattccagcgcggtgtattttctgactctcaaaaacaggttccagaaaagctgtggactaaatcctgaaaagagaaataattttctttctgttggggaacttgggatgaacgttgtagggtgatttgaaagagagagaaaagtctaggccaggccggactagacttaagtgaaaagatggaggttactgggccccagatcatagataggcaagaatccacccaggagaatggtttctggcctttccagaaaagagggatatcttctccaccttctattgttctagaaattcaacatcaggttaaagcatcactcatttgaaacttcagagagcttctgcccacaagcctgcgatcccaaacggatttagtgcttgcagtttttcaggcttgcacattaacaccacacgtatactgtaagttagattacagaattctaaatctcttcttttaactgctgttagtcaagaaaagaaaacgtgtattaccttaaaaaaataacttcctgagttgacattatagaaagtgtaattaattaggacaactacttgacttaaaaattgaatggtggattttttttttaatcaatgtaaatctgcatagttgcttatcggagtccagagatttccagaaagtttaaaactttatgcctttctttttaaagggaaaagttggtgatcttaggtcaagtttcttgtatccatcctccagccaaatttgctaggaggaaatgtccaaccactaagccgacagtttattgtattgctagaaggaaatattcaaccaccaagctggtagtttattgcacattttgaagaagtaaatataaaacaatttatcagtcaccgtgtgaccgcacactttgtcatgatttccttgttgctagagatgatgcaaagatgggggaaacattagtgcatatactaaatgcccaattccagaattttacagtaataaagatgatgatttatcgtaagtataaattacatcccaggtactctcttgtggtgtaacctggagatctgcattcatggctgttgaatcatgtgtgtgcctaaggcttctaagatctggtcatgaatgttttgtgtgtattgcattataatacagccataatcctccaatgactgtaagacacctataatatttgcactttacagatgagggactgaagtgtcgaaagttatttattcaggaaggggacaggccccagggtttgtatctagttcatttaatattactgcagatgcatcactgactaaaatagaaaccaatcaaaagtagctgcctcttctcaaggggaattgcaaatactcaaagtcctccagtgccccacttcaagtgtccgttgatcttcaacaagtttcacctatactgcagtcttgtcttcagtgaaacaatgaatgtagacacctttacttaatagaggttcagagaggaaggattggaattaacaggtgtgttaggaaaatagagggacacccccccccacacacacacacaccatagtctctggtaatgacaaaacccaggatgccaggaaggatgctgttaagcatcaagaatcaattctggtttgggtggatcttcagttccacaagaaaaagtcatgtagggagcacttcccagagttctgtaaagtggcctttttcaacccgcctgcttttctggtccccatatatagtctgcaaagtgtttaaaatgtaactatttgcagaaacgtgtgacttgtctgatttgacacccacatgatgcacagtacgattaaggagtttcacaatcctttttatggtttcaccaacacttgctcatttataaacatttagattctacctctaggcgttcggtttttggttttttttttttttctcttcttctttgtttgtttggcttttttgttttttagattacaaacaaaactttcacgggttgctggttttttttttataaagtttgttatcacctccgcccaaactacagttcttgtttggtcaagaaaatgtttgaagagaagaggggaaacaattaaaacttaaaaaaaaaaaagatagatcttttgagtccttaccattcttcagagctcaaaaccctgtgtttacagaatactcagggaaaaaagaaaagaaaaagaaagaaaaaagaaaaaaaaggaaggaaagaaagaaagaaaaaaggtgaagaattaaaattaaaattaaagtactttctgataagcaatatcaaaataattggcccagagctcaaccaagaacttcatgctggagacttaggtctccctccgggaccaaacgaccaaacaaaggccgctactttcggctgtactgggcgtccgttgaacccaggcaagagaagggtggtttcatttgctgtgtggaagaaatcttggaaaacaggaacatggttctgaaaaaccgtgtggtgaggttctctcacatttgttgccttttctccttcaggactgccgcttcgcttcgaagggaccgggccctctttgtcattcttcgctggagccgctctggagctagcagctgcgcctgggtgtgtagcaggcagaaagcaaggactaggcttctttagccggtgggtgatccgaaggcctgctcagggtgttcgagaccagcctggactgcgtctgggcacctccagcctctgggccctggaatagagtccgccctcccgcacgatttctggagcaaccgcaaatccaatttgggattttctttttcctgagcaaaccagagcctagaggtttctgctttgatgctggatttaattcgtatatattttgagcgagttgggcctctcctcgttttttgatctccggttgttttttttttggggggggggttagtttttgggtttttgttttgttttgttttgttttgatttttggtgacagttccgcacacccgcattctagttcttgtctgcctcgtgctcagagcttggggcgatgtaccaaagcctggccatggccgccaaccacggccccccgcccggcgcctacgaagcaggtggccctggcgccttcatgcacagcgcgggcgccgcgtcctcgcccgtctacgtgcccactccgcgggtgccgtcctctgtgctgggcctgtcctacctgcagggcggtggcagtgccgctgcagctggaaccacctcgggtggcagctccggggccggcccgtcgggtgcagggcctgggacccagcagggtagccctggctggagccaagctggagccgagggagccgcctacaccccgccgcccgtgtccccgcgcttctctttcccggggactactgggtccctggcggccgctgccgccgctgccgcagcccgggaagctgcagcctacggcagtggcggcggggcggcgggcgctggtctggctggccgagagcagtacgggcgtccgggcttcgccggctcctactccagcccctacccagcctacatggccgacgtgggagcatcctgggccgcagccgctgccgcctctgccggccccttcgacagcccagtcctgcacagcctgcctggacgggccaaccctggaagacaccccaatctcggtgagttaccttagggccttgagcccagtctgggacattcaagtttcccaactctgttggggttgaggaacatccttgatgcaaggagcctcccaggaaggcagcccagaagtcagagactccaggtggtggtggtggtgggccacagtgatgatgagtagcctggtcaccaggatccagcaatgtctgggtagcctactggtggcagtgggaggtgttgggttctctagggtcagctggaacagtctggatgtgatatctgggattcagcccttacttcctccatcccttcctctgagacctcaacaaacttgagacctgcgccatttggcaactaggttagaggatcccccagggttgcagatgactttcctgtagggggttttcacgccggaaataaatgaggagatcagcaaaggagaccgccagaggtgggttaaactggagcctagccctgcttgagtcctcaggcacactctggggtctcatggagccactcccttgtcagatactttaggtcagtgtctggggacagtgcagagggggttttttctagtgcctggattaaatggagaatttgtagggctgcctctttctcaggaagccagattaaccttaacaatggccagtatgcccatccaatgtcagactcggagggacagcaacttgcccacttacacaatctacacactgaactaactttcagaggggccctagccacttgggccaggggaaagaaaggaaagtggctgtccactcgtacaaaatgccaaagagcctatttctggaatggaatggaggtgcagtttggatggagctggctctaggggaagagaggaagcacagacttgagaaacaaagttaatgtttattgactacctactaagtgctaaatcctcttgcatttgctgtcactttgaagagtaaagtctatcccttgccactccctgggtggccatggaaggtccctcaagaggggggggtctagccaaacatacatctcaggtacactgattaacaggaaaagtggcgccagagatgggtttgtggctaccaatgtcttcctccccccgcagggccaagaagacaacacccagaggaaggagcacagagcagggtggtagtttccatctggttgaggctggaagttagtttgtggggtggtattggcctgaatccttagtagctgggttcccttcaactccacccaactcctagcttaaaataagaaggaataactgggtgtgatgccccatgactgaaatttcagagagggggaggagagcctgggatacatggcagacccagtctaatttaaaaaaaaaaaatcctagaatcgggattcagtgtttggatacagcaaagagtgaagtccccattcaaagctgaagaagacattcctgtattcagtataaaagcaaaacaaagtgacattgtgtgactgtacccgtgagcacgggagctgaagaaggttccccaaattccaggatccacacagggcaaacaaaacaatagggtacgtgcatcccctctctctttaagagactatatgttgggttcttgtgtctgccctacaagtcagcacatgagaccctttgccaagtctttaaagaaatgatctgggattgtcatgagggagcaccaggcatgttgagaatctattgtcatgcttccatgtgtttgggagatatacttgggtatttttgcttgtttgttttgtttttgtttttaatcacatagcccttgggacgatctgacagtctggtggcactgttcagttaaaagtgttctgtgtgaagatgttttcttctccagccctaccctaggacagaagattagacagtctctgacataggttggataaaggctctaccactaagagatagtcctagctgcttccttcctacctgttttgtttattgcctgcctattcttggacattagtcatgcttggtagcttcagtgagaatcagccatcatactagctgatggtaccaagtgcctgaaggagaaaggttctctgggctaattgagaggccccctttggatagatgttatgaccattgaggtctaaaacggcatatagcatacggatgggatcaaaggcattttggagccaccaaacctcagtgccatgtgaccttgggcaagttgcctacctctgtccgtctcttctcatagtctgtagggtggcttcagttcagctccacttctcttagatgactttggtaagctatgtgatgtctagtaattgctcttttataaatgatagctcttttattagtttttctactttttctggggctaaagggcttcctgggacttggaaattttagtattaaacctgggacagtctactgagtaagaatagttggtttaccctagttagatatggaaatgtataaatagttaccctaattagatatgagaggttttgaatgacttgtggtaaggggagatgagctgagagccaagctgagaccgcaggagaggagctttcctctgaagccccggaagtctccaccgaaggcaccacagcaaagagtctggacctgcagttacagcatgaaagagagaaacacaagctcacgtaccccacgcatgtgtagaactgtggaatggtacaatatagtttgtgttttgctttagtaacagattcatctccaaaggtaaatctcagagaccaactcctaagtctgaaatatttttagtttgtgttgaggaaaaaataagcaaatgtcattattcctttttatgaggttgaactgttttggtattaatagctaacatctagtaagttcttgggttggctattagaataaggcaaaactaaaactaaaaataaaaatgataaaacccaacagggtcatgtgaaaatacctgaagttggcaagggataaattattcttccctgactgtaatatatgtgaacttttgttcattccaagttcaacagacccaggaccctgaagcaattgttagaagcattaattaggcacaataatggaattctgtgaccttactgagacgggtacagagtcttactcatacataggtgcctggcacatgctgggcaagtagcaaatgtttgagtaaagatctgggaggtaattgccccaggactctgccctgccctggtcaagccgcacagaacgactgccttcgtcctttaagaagcaaattagaactgggtgtggtggcatacacctgtgacccagcactcaggaggctgaggcaggagaatagagagctcaaggctagtctgagctccatagcaatcccctgcttaaagaagaaaaaaaaagcaaagatagaattagagactcggagaagagtgagcagaactggcgaggacactagaaacctaggaccactgcagacagctgggctctgagcctgtgctgctctctgtgaacaggtgttagagttaataatactggagtgtttggctatggctgtcacaaagtgtggtgcacacagatcgtggcttgtcttcgtgtttgaatggggtctggaggtccagctttcatgcaggctgcatgcaccgctgccaagacagctagccatgtctagttcttacaacttcagggcggcgcatgtgcactgtgacattcctgcagcagagaaaaacagccatctctttttaaaggacacagtgccatgaggaccctgctggagacatttggttaaattcatggagatgtactctttaaaaaattgcttttagatttatttattttgtatgtatgagtgttcttcctgcatgtgtgtacagaagtgcagtgcagaagccagaagagggtagcagatggtctggaactggagtcaagtgtggttgtgaaccatcgtgtgggagctgggactcaaactcatgtcctctgcaagggcaacaggtgctctaaactgctgagccatctctccatcctgagatatattcttaaagtaggagacttttattgtgtgtacgacacatcacagtctagtcaattttgtgcccattaaggcttatatagacctaaagccaaaaaagaaaccaaaagaaaaaaagaggagactgaaagagattagatataaaaaacagaccttgaaatgtattgcttgtagctgttactgggatgtctaagaaatatagcttactaaggaagagcgattcttttatgtcttaaagaaataagtaaccgtactatttttagaggatttggggaaaaatatggagttgtttgagggctcagtgagaataacagaaggaaacaaatgtgtgcattgctatggaaataacccaaaaagggaaaagtattgctccatctcgagtggggtggggcggttcaaggtgttcagagagttgaagactgaggtcagcggaaaatgctgtagtgtttgttgggtcttttggggactgctttatcaattaggccagttgctttcagagctagttcgcttagacagggaactctgtgatccctgaggtagcctgttgggctcaagaacaatttgttagtcttaagaaaatcaaagttgtttaattttccggttaccaccctgaataggccaatcaaagtgggaactggtttgtggtgctaagtggagaaccaattaagtaaggaaggtgtgttggggtagcctggggtgtgtctcgacctctagtgacacctgtcacttgcccgtttgtgtcccatgaaaaggtcaggccacatttgctggtggaatatgctcaggagacagtgtagataatggcttcttctgtccccttccctgttatttatttttcccccctctttaaatgcactaagaagacaaacagactgtgaggtgtgggggacaggaactctgatacctgtgggtgggaatgttcatcggtacaagctttgtggatagtcgttggtaaaccagtcaaattacagagtagatagcccttgacattgaacttttgactccaaatcatgaagtctgaggtacatatttgccactttgtcacccataataacaaagctcagaagtaatacaaatgtacaccaccagggtatacatttcatatgctgtacacccacctaggcagatatgatggctgtcattattaggccacataagatcctttctgagccacttggaaatactatgttcttggtgttaaacatggggaaatacattgtatttctttgaaaatacacaattatctatctctaaaagccttcattgggccctaggtaaagaatttgtaacattgattatttatggggagcccaaagggtagaaaagggatgaagttggagaagcagcttgctacagccatgtgtgttgcaaaattgaaaatgtgctttggtcggcttaaccctttttgtgcttcataattctatcaaataataaaaatactcatgtcatgggtaaaggaacttgtggctgacactgacagcttgagtttgatccccttgggccgacatggtaaaaggaggtgctctgacctccacacatgcactgtggcacacaaatgcacgtgcacaaacacacacacagacacacacactaaataaacatataacttttacccactgagccatctttctggccctgatactgatactattttcttcctcgtcacaggaagttttacgcatgcgtggtgttagggctcagcattgctggacgatggatcttgagaatgtctctcattctgtagaacagcaacagttccgcagttcccgctctgtccgcttagtctgctttccatggctgtgactttgattgttctccttacatcctatgagcaaaattatacaatacttttatctcgtgtgtcaggtgtatttcactcagtatcatgtcttcaagctgtaccatgtagcagtttcctcctttaagctgaggggtaggccattgtgtgactacattgtctttgccccttcctatgtgtgtggacacctaactggctcctacataccactgtgcgtcctcatgccctgaatgtgcaacggaatcttttgaactttaaaaacagaatgatggttaatcgcttttaaatactataagactgggtggccaagttggctcaatggataaatgtccgcactgctgcttggtgcaattgtgacggcctgagtttgatccccagggcacgtgtgaggatggacgcagaggactgactccaaggttgtcccctgacttccacacttagcatggcacgtggaccccacgtgataataatgatgggaagaaaagataatgaagcttttaaaaacagacacatcattcatgaaaaattttaatggtgtttatagccaggcaggaaaggcacattgatttttattttttacttggtttattcctttacaaactcctggaattccccccatgccctatttcaagatcctgatgagcagcttgatccatccttacctgtaccctgaatctgtctttcaactttgctccttaactgaggacagatctcgtgctgtggcaagtcagtctgcagctgtggggcacccctaacccctacatcccctcctgggcacaaacacttagatctggtagttagtgaccacttctggtggacagttctccttcaagtgatattaagatcagaacttgccggaaaaccaccaaccttttaaactggtcacctaaactgccctttaaaaataaaggagttggggctggagagatagctcagatggtaaggtggctgccatgctagcatgagaaccggagttcaaatccctaacatccctgtaagatggcattgcaagttgcaactgtggtgctggagcaagaggaggggcaaagataagctgatccctgtaatctactggccagtctagtcaaaccagtgcgctccagggttagcaggagaccccatctcaaagatgagggccagcaagatagcatttgacgctaagcctgacaccctgagctaagtccccagatcctccatggtgggagaagtgagcccactccccgggttgtcctttgacttgcacgcatgcaccatggcatatgcatctcctccccaaaataaatatacagttttttaaaattaggtggccagacggtggtggtgcacacctttaattccatcactcaggaggcagaggcaggtggatttctgagttcgaggccagcctggtctacagagtgagttccagaacagccagtgagcgatacacagagtcttggggggagtaggtgaagagtgactgagagaaacacttgaagacaccctctggcctttctgtctctgtctgtctgtctgtctatctctctctctctctctctcacacacacacacacatgcacatgtgtgcactctgcagttaaatgtgctgaatttagaacagaagtcattgcaaaaattgttgcttctgctgagttggggggtgatgggagaaggggggactgtaggagggtctcgttgggttttctagaagcccaattcttttgaaatggcctgctgcccaaaagacgtcccagggaactggttgacctttggtagatcatgatgaggcctcgtgcagcattctctgagtggattactcacacattttattggctctctatacagctgctctcttgtcagcttctgaagaaaaccaggaaaattgtataagcagggatagcaggaattaaccttgaatccattttaatctatgtaaagtaaatttatagtctcggtcggtgaacatgcacttaagaacaaccttttagagatggcagccttacactacacaacaacccactgtgagaaggaagttggaaggctgccgctgactgctgactgggacggctaagtcggccctggcaggagtagggtggggtgctggcctctgtttgctggaaagaaacgaatgctcagaaagccttgtgctccccgtccaacactaccagcaagcaggagctcctgcttagcacagagagaaacctctttaggtttgcagcttccttctcctgtagactctgctacaccgagccttacagaattgttaggctcatggcagctaacaggctcccttctgcaaggtagcttttcagctaggcctccttgcttcttgtgggctagttagtgtttctgcagggtctgggtcttcctgagtcctcatcgcgtccattccttcccgtttacggagctggcaagggggtgatcacatcgataggaacctcagatgtgtatacccttctcagcctcctgaagttgatctccagagaatgatagcaacctgccgaattcagagctaggtgttcccctaactttagacggactgttggctgtttaggaaaatcaaaaccccaggattctctttaaaaacttctagaggcatctgttccctcttctccaatcttcaatgactgtctcagatgtatctgtgataggtagagaaggagaggagcatagcagaccagctatgtttttaataaggacaagtacgggatatgtatgcagaccaggaaggaaaatgcaacctgcaaaaggttgctctgcatggaacccagcttccagagatgactttctcagggttggcaggtggcctgtggttttatctattgctgctctctaatcagaattgggccaggatattcaaacttcttatctcagtgaagagaatttggttttctggcttttggcatttttacagtaagtcatgtactggactcgatacacgacttaccgtagttaaaatagccttctctactgacaagtctaatcaaggcaggtaaagcagtctgtatttaagagtcataaaagtgcctctgtgagtgggatctgttgctgtcttaccctgtgctgaacagccgcagacacactttatttttcatgagaaatgaagaagtcacacatctaggatgggtgggaatttttataggttataagcgccactctgtggggtctcccaactgtggatgaccttagcttccttttccttccccatttaaacatccagttctacttccagaaatccagtcaaactttatcaccttctctcagaactgatcgatagcaactggtgagcaggttaattataatcacagaataaacgcagaagtctcaaagttcaccactttgcaatgttttcagacccctccgggaccatgccaagaggtgctcattgacccactggagcaggtgtggcagtttgaagcaggggcagacaatcggatctgatttgggacaattcaattgtttcttatctgcggcttcccctatcctatgaagtctgtcatttcagataaaaaggctcatccattgagctgcgacatggcaggctacattctcctctgataaagttttctggttgtcttatcagattaggctaaaatagttatgtgcctgcgtcaaggtctacagggacctattcagatattttatcaggtattagctcagggggacgacgcgccccgcccccctgccccctttctttcttcgacctaggaaagaatgacctgacttccaagctcataaatcagtcccggcgaagagaggtaataatacaagttgtccctcaaaattgagtaggcagaaaagcgaacgacaaatatgacctttccctagcttgtaagaacttcacttgaccctgcatgaagaatgtggttcccatgattgcagttagcaggggccgtcgctgatggggaggaacaagaaaaagagaaggatgttctccagataaagatgacttcagaaagtcacatatttatttttcccatctcaggaaaactttaattatctttcttctgtacaactgaatgtataagaatatggcaaaatgaaaactcccagggtacctgtcagaagtcttagcacaccgagctcgccagtgctaagcagcaatccccggcgttttagttgctgtacacatatataagcatgtatatacacatgttttttaattatcgtaaaagttactgtttaaaggcactcatcactgggacagttttttaagattcatgagccagcctagcttccaagcactggtcccctcgataaagcaaagttagaggattagtcgcaaggacaggcattgagagccatccaatgcaagaagagactctgagagctagctgatgcaaggctagagcggatttactctatattttattatttattgttgtgctagggactggatgcggtacctgggacctgctaagcacgtcttctaacacagctatcttctcagcgtatttataagttcttaattgcaccctttgaaatgaagtccttcttgcaagctgtgttgatttatgaggctggaaaatgtgagccagagttgtcaacttgcagctaaaaagggttccaggagcagatacagggaggtgacagttcatgggcctggtatcccagagctgcgagtctgtggattgttttcctgctgggtgactttgagccacttacacgacttctctttgcttgcatgtctgcctgcattgtgaaggaggcggtcaggcaaaggaatagtgcaatggttctaggagctgccttagggcccttggaggactttttaaacatttaattccatttttaattatacatatatatgtgagggtgtacatgtcagtagagggtgttgatcaccaggaggtgaagttacaggggtttgtgagccccctgatatgggttctctgtaagagcagttaagagctcaagaccattgagcggtctctccagctccaagggagacttttaaaaaatcaacatgccagccgggcagtggtggtgcacgcctttaatcccagcacttgggaggcagaggcaggcggatttctgagttcgaggccagcctggtctacagagtgagttccaggacagccagggctatacagagaaaccctgtctcgaaaaaataaaaataaaaataacatgcctcatatgggtaactcggaccatgtcgtgtagacgataggtaccagatagcagcagatgtgccttacactggtagattcaagaaggtttccatggctacctgtctcaatacccaacagtgtatttgaaatgacagattatatgccatgattcaggtttttttttttctacataataagccacatgacccactaaaatatataaaaatcagcttgtgggagccatgggtggcaatgtcaacgtagatgcattgttggttttggtttattaatgaacccactcatgggctggagggatggctcagaggttaagacagttcttccagaggtcctgagttcaattcccagcaaccaaatggtggttcacaaccttctgtaatggaatttgatgtcctcttctggtgtgtctggcagctatagtgtacatatatataataaatcttttttaaaaattcactgttagagatcctaggaagctccagagagtcacagaatgtagagtgggtaccagacacaatcctttcttcctaggtcagcaagccaagaagcatctctgcagactctctgtgagccccacagctaggctctggagataaaaacataagcaagacagtctctaaggagttagtgcgctctggctggagtgccagtaacacacaatatgtacggacactaaacagcaagtgtggctataaaagggaaacttccattatgcaggagcccatgtgatacctccacctgtgttggtacaggaactagaggccaggcttcctagaaaaggggatctgtgaagtcctacaggctaaatgggtgttagaatggggaagatccatactgctaggctatacagttacaagttagggctggggctggagagatggatcagtggttaagaacactggctgctcttccagtgttcaattcccagcaactacatggtggctcaaaaccctctgtaatgagatctgatgccttcttctggtgtgtctgaagacacattaaataaataaataaataaataaataaaataggggggaaaaaaacaagttaggactggctcacaagcagaggaacattgaaagagtcaagacagggagggcccgggggagttagtagacttgaaaatagagcagggtttgagtcattcttgggtcttagcactttggttttgatgaggaaagggttagactagagagtcctgcttttgtgtacttcagtcctgcagagtgataactgcctctctccattctgcacccgtgagagactcccgtgaagcctctgattcaatggagcctcatggtcatgcacactgggaagtttcataagtattctttttttttagtaattagttttaatttatttttccccctaagatgggtttctttgtgtagccctaactgtcctggaactcaaccctgtatatgaggctggcctcaaactcacagaggtctgcctgcgtctgcctcctaagtgctgagattaaagatgtgtgccaccacactcggcacaaaggtattctgaagctgtcaagcaaaggcagccgtgtggatgcactcacgggggtgcactcacagtggcctgatgttaaggctgagagggtaggggcaaaagggaaccaaaccccaatcctccacccaactctggggtgcaagaaaggcagtgatctgaccctaggaggcagtctgtcctagccctacctccttgcactttgtgtaacaccatccacctgtgttttctgtaatgtggtaaatggtgggagtggctttacacaggaatggcagtatttgcatggggaaaatactggtttgctttgcagcgcaaagagaaacctcagggtttgcataagcgaggaaagcactagccacacctccaacacgcccccatttcatcttattattttattaattttgatgtagagtcccaataagttgtccaggctggccttgaagttctttggtagctcagacaggcctgggaattctagtcctcctgcctcagctgggatataacagatctgtaccaagagccttgacatgtatttacacaagtatcagtggaccctgggagtacatttactaacatccctgaacatctctgcatccagaggaaggcttagagatgaagctgaaggagtctggttagcctgctttcctgtcttattctgaaggtttctttaaaatacatcactataatgtttgtttgtttgtttgtttgtttgtttgagataggctttctctgtgttgccctggctgtcctggaacatgctctgtagaccaggctggcctcaaacccacagagatcctcctggttcctgtatgttggaattaaaggtgtgggccaacgctaccctgccccagcatatcactataattttaatttcaattctcattaaactacccaggctggccttgaatgtgttacatagcctaggcacggtcttaaacttagatctgtctgtctcagcctcctgagcggctgggattgcaaacctgatcagtccctgctgcaaacgctgctgttttaactctgtctttccttcctcgtttgttacctgaaattcttcataagaaaacaattttcaacttactgaatgtttggccacctagagtagcttggcagggagagacagaataaatgatttctattttatttttcaatgttcaaagtaacaaatcccctcctccagcatcctcagagatcacttattaaactaaataactagagttcttaatatcccttttagacatcttagacacccctggtgtgttttggttgtgtgtcctgattgttgcccagatggtagctttttttttgggggggggggtcggcgggagggaaggggggggggcttgttcaaattggcttctgggtcatttgacaaaattgaataattttctgcatcacgctacagaaagtcccaagcttctccaatgcatgtttttcctcccccacctgagtttgatcaatttcttgggaaactaaggttgtctcctctgtggcaaaaccagagaccagtcagagccagctcagccggttgtgggttggttatccaacatgctaaagaaacaaccaagcaagcaaaaccacttcatgctggtgagatggctcagtgggtaagagcacccgactgctcttctgaaggtccggagttcaaatcccagcaaccacatggtggctcacaaccatctgtagcaatagctgacgccctcttctggagtgtctgaagacagctacagtgtacttacatataatcaataaataaatcttaaaaaaaaaaaagagttaaaaaaaaaaaggttaaaatatctgtatgttcacacccagtttcatccctgtcactgtgcagcccaggaatggtgttacacgtaccctagccttaaacttctaggtagaggtaaggggatcagaagcttaaggtcatctttagctgcacacggagcttaagggtagcctaggctacatgaccctatctcaaaaaaaaaaaaaaaaaaaaaaaaggaatgtgaatgtcttctgcgggcatgctaatttaccacagtgtgtccatttcatggtctgtttgttttgtttttttaaaaatatttgagccgggcgtggtggcacacgcttttaatcccagaactctggagacagaggcaggcagatttctgagttcgaagccagcctagtctgcagagtgagttccaggacagccagggctacacagagaaaccctgtctcaaaaaaccaaaaaaaaaaaaaaaaaaaaaaaaattgaaaatttattggacgccctggaactggagttacagatggttgtgagctgccacatgggtgctggggattgaacctgggtcctctaggagagcagccagtgctttaaaccaccgagccatctttctattacccccatctcctgtttttaatcttcccccaaagtcccaactcaaaagtaaattgtcctatgtcagcccttagtctgctttctgtctgaatgaatggctccagatatcttgtaccacatctatgtgctggtgactggcttctgtcaccggcttaattctctgagtttgtccttgattgcagcatgaatcagcatttcctccctctcaaggctgtgtactacgcctttgtatgtagaggccacattctgtgtgtccagccatcccttggtgggctcttgaaatgcttctgccttctggatatagtaaacaacgctcctacttctatatggatagtctattggagtcccggattcttcttcttcttctttttttttttaagatttatttattattatacataagtacactgtagctgtcttcagactcaccagaagagggcatcagatctcattaagggtggttgtgagccaccatgtggttgctgggaattgaactcaggacctttggaagagcagtcagtgctcttacccactgagccatctcaccagcccgagtcctggcttctctttctttagcacacacggcagaagttgtattgctggctcatgtggcacttccatgtggctctgaggaccaacccatttcccagtgcattggcaccatgtcacatctttcatgaattctcctatttagacaagtagccttgtttaaagcccttttgtacttatttattgtgtgtggagggataacctgtggacatcaggacagcttgcaggactcgggtctttccttttaccatgtaagtctggaaactgagctcagacatcaaggaagtaccttttatctgatgaaccatcttttattattattatcatcatcatcattattaattatatgtaagtacactgtagctgtcttcatcattattattattaattatatgtaagtacactgtagctgtcttcagacactccagaagagggagtcagatcttgttacagatggttgtgaaccaccatgtggttgctgggatttgaactcaggaccttcggaagagccatctttccagcccctgatgagccatcttatgggttccaaaatcccattcttttttttttttctttttttttttttgtcgagacagggttttcctgtatagccctggcaatcctggaactcactttgtagaccaggctggccttgaactcagaaatccacctgcctctgcctcctgagtgctgggattaaaagcgtgcaccaccatgcccagcttccaaaaatcccattcttgacaagtgaggcctttgatgttcattagtacccacatatcccataataccgttaccgacccttccactggggaagatgactgctgtatgcctgtctcagctaattcttgcctttgctttcacctttaatttagttttcttttgcagtacaaaaggcaggtccaggacctatgtgtgctgggctgcctgtgggctgcttttcttttggactttgggtttgcccccagtgtttctagctcttggctttgaggtcttttgtaacaacacccacctctcacctacaagtagcaaggtagccatggtggctcgtgataaagagggccttaaaaatcagttggaggaaggctttatgcattcagggaaggtgtaacaaaagccatacactggaaaatggggcgggggggggggaaccggggggggggggaaggagaggtgttcagacagaatcttcaagaattagtacatggcctgtgctctgccactctgtacctcatgctattggatttgccttcttggtttgcttgtttgtttgtttgttgttattggtttgtttgttgttgttgttgagacacagtctcatgtagcctggatagccttgcacaaacttggtatgtgctgaaggatagccttgaacttctgatctttctgcttcctcctgggatttagggcgagcaccaccacacccagttactgctgtgctgggggttgaacctaggtgtttgtgcttcctcggcaaacgctaacacctaagccacatctccatcttgctgctgttattttatttggtgtttcattggaccaaaaatgtctcgagggcaagaattaacactgcattttatctacgactaggttatagttaacatctgggtaaatgttcattcatgaaacaaagtataaaatcagcctgaagttggcaaactccctccattccacatttatgccacatgaacagtcttactgagactgctctcatagagggccatccttgtaaaagggcccttggagcagaggtctcatctaacatgaggctaagaggctggagatcacacaggactcctgtggcacatctcaaagggagctgggcactggagatgggagcagcatttggaagaggtgaatttgaggccagggcactagggcatccaggtggtgtccagcagacaattggtcatgcactggccattgctgcacattgtctccatttgaaaccttcaaaaccacaggagactcccagggcagcagataggaatgaagaggaacgaggagccatcccatggaaagggtggctggggtggaaggtgaaagtcacagtaacatgctgacagacaggaagcccaaatctcaagggctctccaaattatgccttgaaaaacataactgggctcaaacttttctcccatgatgctccaggcctccaataggctgccatctttcgtggactgtgtatatcaagacatggggtttgggcccacagtttgtcatttttcaatgccgaggcccaagtcctctctccctcaccctcctcacactgagtggagtccaggttccacagaggggagggagctgtgtctaacagtacctgcctctcagcctcatcttaacaaagggccaaggagctctgagatcctctgtagacacaaactcccccagtcagactctgtttaaatcatgtaagtgcctgttgattctgaaggagagctctgcctgccttcaagtgcttcccagaagtgacgagacactttgctttcggggaatgttgatattaagtttcctgccctatgtaaacacacctccagaagtggcactcataatggagaccttttccctggacaggactggacaaatagtggagaggagaggaagaagggagagctggccacatggacagtgtaactcgctatgtgtgtgaagtgggggagccctgttgtcaaactttctgtcttcatctgcagaacttctgcttatagtcctggccgggacttccagcttttctattacctggccgctgaaagatgcgaggcagcgtcttgtgaggagggagctggtttggagaatgacacctgatttaaagccctggttttactctctgcaatgtcctctacttttcacatctataacgtggacttgagggctaggggtgtgactcagcagaaaagcatctgcctagcatgcatgaggcctcgggctccatcccaactacaggagtagagggggatttgctgcctgtcttgaaggaagtagataggccagtctctgctgctggttcttggtgaaatgagctggacagtgtctcctagctatgtgggcctttcttggcctagagtcataaagttatggggtgtaatcttgggatgttaccatgactacagaggtgctagagctctagctcggttggtacagggcttacctggaaggtataaagccctgggtttgaacaccatcgtcacataaactgagcatggggacacacacacccataatccaacttgggataagaggctagagagtcagaagttcaaggtcaccctccattacaaagggagtctgggaatagcctgagatactctacctaaaaaaaaaaaaaagaatagagtagaatgtggaaaggaaggaaaggtagataacagatatgtgcacatttaccctcagtaggagtctttgtgtatctatcttcatatctcgaggggtgaaacagcagaatcaacagagataaatattgctcacttcccagaccttgggcagtcttgagtagtctggggaagctgggacatggggtggcattagacccccagtactcactgttccttacttactcatggcatttttccagtgactcccatgggcaggagctgcagtgaccatgggtatataaagaaatcacagttataggacctgaaaacacaagaggcctgccatgagagtggcttggcttcccattgcccgtgttagctgccctagggtctcctaagctgagtcagcaaaggggtgcggcagtagtcaagacttgacagatttaagaatacattcttttttttgtttttgttttgttttgtttttttgtttttcgagacagggtttctctgtataaccctggctgtcctggaactcactttgtagactcagaaatccgcctgcctctgcctcccaagtgctgggattaaaggcatacaccaccatgcccagcaagaatacattattgaggggctggagagatggctcagaggtaaagaacactggctgctcttccagaggtcctgagttcaattcccagcaactacatggtggctcacaaccatctgtaatgggatctgatgccctctttggttttttgagacagggtttctctgtgtagccctggctgtcctggaactcactctgtagaccaggctagccttgaactcagaaatccgcctgcctctgcctcccaagtgctgagattaaaggcgtgcgccaccactgcctgactggtaaataattatttaaaataaaaagaatacgttattgactaaacacatagaaacacaattgcccaaaggtggcagcaacctcgtgtccaccaatgggccagtggaaattaggttgttgccatctcgagtagaactattattccaccttaaaaaggaagaaggttctggaatatgcacaccagggataaatcccaaaggatattatgttaagtgaaataagccaatcatgaaagaaacaaatgtacagttgcccttgtatgagatataaagagaaggtaagttcacagcgacggtggagaggtttggtgttagtagttgcagagttttggctttgaattaaaaaaaaaaagtcaagctgggcgtggtggcacacacctttaatcccagcactcgggaggcagaggcaggcagatttctgagttcgaggccagcctggtctacaaagtgagctccaggacagccagggctatacaaagaaaccctgtctcgaaaaaccaaaaaaaagtctccagagattgtttgcacaatggtgtaaatatatgaaacactattggactgtatctttagaaatgcccaagatgatacattttatatgtatattatcataattaaaaatgcagaaaggtagaaaatatggaaagcatcatttatagagagcaatggcttctcttcccaaaaccctgttctctttccttccctaaagatagagagaggatatggtagaactctactccagaaatattttttgtctacatggttactttttctggaagcaaggtcttggatatcccagggaggcctgggactccctctgtagccaaggatggccgtgaccttctgatcctcttgaacctaggcacgctaggaaagccaactgagccaactgtcaactgagcggcttgctagccctgcaagactgttcttctgtggctgtaactgctccatgcttttcctaggatgtaaaaggtggattgagctcagggccttttatcatcaagctgcccaggtaggatgggccaggtgcctaacctcagagagtgcacggagtcactgagttgggtggattctgtgtgtcctcctgtaggattgtggagaggcttcacagcatctggtttgtttttgattttagatgtttgctaggcctctgaaggattctgaggctagagacaagtaaaggagaaagaaaataaatccaatgaaaacatgaagtatatttaatagctacacacttacgatttaattcagcaccaaaatatagtttgggagaaaagagcaactgttaattttgattgccaatttggttggattaagatatgtctagaggaggttggagagatggctcagagaatatactgcttttccagaggaccaaagtttaatacctgttgctcatgtaaggcagctcacaaccacccgtaactccagccccaggagacccaatgtttctgacttccgagggcacctatactcacatgctcatgggcacacacatacacacacacacacacacacgtagggggcagaggcagagagagaaagacagacagacagagacataattaaacaatgtttaaaaacaaaagtaacattatttaaaaaagcaatccacagggcactgaagacacacctttgagtatgtttgtgactgtttccctagaaaagattgaattaggagggaaaaactaaacttagtgtgggtagcaccatcccatgagccaaggtcttggaacacatacaggaaaacaggcaaaggcaaggtgagcgtggcatcacataagaagcagctgccacaaactcctaccaccacagatggagccccagcctccatgcccctgccctgtgatgggacactatcttctcaaacagcaagccaaaataaatggtccctccttaagttgtttctttgggacattttatcccattgatggggatctaaatgatatttcaatgtgagggtacaacaggtgacttaagagaaacatgatcagctgccatttgagcccatgaggacactgtagtggcctgaagaggaagaacaggtgacaattggagtgagttgtattcaaatttgaggcacacacagatttcctgagagatgacagggtaaaggtatgccttctccccttcttctcgaaagaccactcccccaagtaaaacaaaacaaaacaacgtaaaagtctcatcaccaacgaagttagagggcaactcatgcccactatgcctcactgagggaaaagctgggagcctgtctcagacctccggctgtgactcagtttccctgttaaggaaacaaatgagcttggaaatgaaatgtggaaatgttagcttcttagctgaaagactgtcagcttggtaaacaagtgggatctgcctggggaatgctcataaaactcgtggagaggcattgaaagacacgggagtgggaaagacaccagaatcttggagtaagacacagaagatcttctattccacctccctcacacaagtctataaatttaatgcagtcccaggaaacagcccaataggatttcttaaatgcaacttgtcaagttgattataggatttctggggaagagttattgtacgagaatagccaagataatttttaaaacaaagacttttcagaaaggggaaactttccttatcagaaatcaaaacaaactaaagaggtcctggcacagaaacgcacgcagagatgttcattatagccccgttgtgagcgaaagtgaaaaatgacttgttggaagccggccaaggtgttaggtacagggaggcgagcacagaaagactggtgttagcacggcttcctttcgagcactagggacagctgaccaactgtagggactgagaaaccaaatgtaagtgctatgaacctttagagtgtaaaactaatcaagtcctctttaaaaagtaaagttgggggaagctctccggagagatggctcagtggttaaggacactgactgctctgccagaggaccagggttctgttccgagcacctacagggtggctcacatccagcagtaactctagttccagggggatatgatgccctcttctgaccttcacaggtattgcatgcatgtacacagacacacagacactcatacacacaaaagaaatctagagaaagtatccaaggagctaaagagaattgcaaccctatcggtggaacaacattatgaactaaccagtaccgcagagctcttgactctagctgcatatgtatcaaaagatgacctagtcggccatcactggaaagagaggcccattggtcaggcaaactttatatgccccagtacaggggaatgccagggccaaaaaatgggaatgggtgggtaggggagtggggggggagaaggggtgggggacttttgggatagcattggaaatgtaattgaagaaaatacgtaataaaaaatttaaaaaaatctaaataatatctttaaaagagtaaaggttctctgtgcagttgtggaaaatgtcacacactttcatgaaaaatcttactatagaagaatgtgtatatatgctttttcctaagactagtatgcatttctctcttctgtcaccctggagatagggacttgggaaagggacttacctttgtgtcaccatacagtcatctaggagagggcttttgtgttgctctgccatggaatgtatgattcaacttcattctaaatgccagcaggcgggtcagcaagatagccagcgcagtaggtaaaggctcttgccaccgagcctgacaccgagttggatccccagatcccacctggtgggaggagagaactaactcttgaaaattgttctctgatttccatacatgctccacggcacatgcatggctcccaataaatgagaacataattaaaaattaaaattccagaaggaatcacacattcatatcagaactatgactagcttacaggtgatgcgtaatgtgaacagaaaaaatgcccttaatattataagctcattgtaagttctattgatatttggaggatgcttgctaccacataagctaataatagctgattggtgtgtttgtgaattgtgatgttcagtgccctcaagtgaggtaaaggagaggtatattttgtttcctgaaaccgttctctttttaggttttttgaggcagggtttctctgtatagccctggctgtcctggaactcactctgtagaccaggctggcctcgaactcagaaatccgcctgcctctgcctcccaagcgctgggattaaaggcatgcgccaccaccgcccggcatattttgtttcctataagggcattaattccatacatgagagctttaatctcatggcacaatcatctctcaagagccccatgccttcatgttcaggctaaaggagcacaaaatatcataatgagacaatggataaggaaaatgtggtggctggatgcaatgaaaccatggggcagtacatcaacaggtccatactgtgaggatggatctaagataggaattgtggcttatgaaagggaaggggctacatccacaatgctttgtttgtttaaaatgaggtaggtcagcacgtgtttggcatgcaggaggctgagttcaatcctcaatgctgaaaaaaaaaattctgaggcaaacacaaatatggcaaaataattcagatttgacaaggccaggcagggggggccctatcgtttgccacattctcatttactcagtgactgaaatagtttatgtttttcaaacataagtaaaaattcactatatagcatgaagcactcctttaaaatttttttagaaagcacaaagtaatatttacattgttcagagatttatttatatgtgtgtgaaagtataaaagtggaccagagaatttatgtgctgccttcaaaaaattggttttgagatggtaaagaataaaaacattattttttgtagcttcctactatttaaaatttttcataacaataaaaattataattaagaaaattgacatgttgaaaaataggaccttgtcggccaccattactagggatagatagtagtgacagtagagacctttaaaaatgtgacactctcctaaaggatggtttggatttttatagcaattttgatttctacagtacaaacttgtaggaataaatcaggaaaagaaaacctaaaagtatattcacgaggaacattataatggagcctctagtcgggtggtttggcagagaggaagaaccttagctaagcattatttattttatattatgaatgttgtgcttgcatgtatgtctgcgactggtacccttggaggccaggagagtgttagaactgtagctacaggcaccacctctgtgtggggctgcgaatccttccaatgctcttagcagctgggccatctccccagccccaaactcaatccaatctccagaccctacagaagaatgtcattgaactgtctttatttattttttgttttgttttctgttttaccaaactcagaactggacagaaccttgcctgctcatatcaagactctgcactcaatgcagaaagcttgcagtagttcagggtacctgggtggattagcgggagaagatgttaagtgcaggggatgggggcttaaccttggtttgattaagtaatccctgagaaaccctgagagggaaaaacagactcagtggatacatttcagcactctggtcccctccccctttgagaaggcgtaaatctcccctgaaacacctccctagtgttcagggcaataaagaggtcacattatatctccataaatctcccctctggctggctggctgctgccattctgtcggagaaaggaagttgttttccttctgacagtggctgcaagcctggaaggaaaaggctttccccaaagacccattgtctcatccccaagggagctaccctggtaatttgttcagtatttccgtctagactgccagcctgcaatactctggacgggtgcagaggcaaatagtcaaggtggcctgtcccaggcctctcctgggaaagtcctgcctcagacttcctagtaaagtcaaggagcactcgagtaacttagcttgagatgccaagcagagccagcagcagcactgggggccctgtgtactcacctaactgtgccatgcacaggcgaggaaagctgttacatactggggcctgcgtctgcctgtggagccagcatgagactctggtgtggaatgagggggcggaggaaggtgatgggacagcagagtggagaaccacttagaaaaggttgtgaaataagatgcttttgtgggaaggtaggacaggaggggaaaaaaatcaaaacacaaaaccttcctggtttcaaaatgtttctactacatggagcagggatgatgccagattgtgacattattcagtcacaatcctgaccatgcaaaatacttactgctcattggaaataaattcacagtattattaaaaaaaaaaaaaaaagctgtattgggctagagagatggctcagcggttaagagcactgactgctcttccagagatcctgagttcaattcccagcaaccacatggtggctcacaaccatctgcagtgggttctgatatcctcttctggtgtgtctgaagacagctgcagtgtactcacatacataaaataaataaattcttttcttaaaaaggctgtactgggctggtgatggctcagcggttaagagcaccgactgctcttccaaaggtcctgagttcaaatcctagcaaccacatggtggctcacaaccattcacaacaaaaatctgatgccctcttctggagtgtctgaagacagctacagtgtacacacatataattaattaactaattaattaattaattaattaattaattaataaaggctgtattaagtgagaagtctctctgggctactaagatgtctctctggaagtgactggtattactgttcccgctctgtctcccatagtctgcactgtgactacaagcagatccatctctaggctcttccctggtgctcgctctctctctctcactctctctctctctctctttggtgagaggcagtgtgtctctgtgtgtgtgtgttttgccctatactttgcttctgatgttttgtcatacgaactagtaagactttcaaatcagtacagagttcttcaggctttctggctgttctatgtgttctctcactgaagccaccagttccctagggaaggatatttgtgttgtctttccagtctccttctattgcagaaggtgactcttctcctcagaagccatttacacaagggtctatacactcacagcacactcatctctagaaatggcatagttggatcgattgcacacaccatttatacttgagatatggtattaccaagtcgctatccccctgggctgagccacacctcctgtcacatgcttcctgtcacaggcttcattatgccccggatgcttttctcgccttctccccagggcaccccaaaaagatggaggtaggctgggaggaggctgggaaggaacactggcacagaaaccagtgaccggaggaaacaggaccagtgctggactttgtccactgtgtgggtggcagcatccttggataagctatatgtcatgctcacatttgctgggactgtgccctggagagagagctttccttctccctctgcagaaaacacgatgcaatggtagatacttgagccaggtgaggctactgctcttgacaggagaatcctggccctgaggagaagggactttgtgggagatgtttagtcacccttttatttgttttttgttttgttttgttctcttgtcctttcatgggtgcaccatggcactcctgaggtagtcagaggacagctttcaggaactggttcgctcctaccatgtgggctccaaggatcaggtcagaaagtgactttactagctgagccacatcactggcccccatttacttgtcctttgagacagagtctcttgtatggtaggatgtttcaattgagatatagcttctggaagctgtctccacctcccgagtgctgggattacaggtgtgcaccatcacgactggctccttccatctattttgagacgtgactatccaaggaattattaaatgggggcagggtggagtagacatctcccatccttcgcatgctaagaagacttattgagttgcttgcccatttaattactttaaatcatgtttgaggaaggaaatcttaatatttctaatataacttatttttcttaacactactccaatttttatttcttgactgaaatttctttttcttcctcctgatcactgagcagttaggtcattttcagtattttgccatgaagatatttaaaataaatatttttcctttggagaattttccagggaattattggagtcgtggttatgcgacgtggtgctctttcccacaggtacacatccatgttagttacatgtgcatgcacagttttgtacacatgtgtacaggtgtgttcttgctaacctctcgtgctgcggagataactctcttagaccagtatcactgtgactagggacagagtccagtcaaatctgtatcaccctcctgggtgccccaggagacacttggagaaggttcagatctttgtggagccccatgggtcagtgtagattgagttcatgttgtgtgcagagcgctacagatggaatgacccagagggcagcagtgtggtgtgggggagggcagggttaggtcactggccttcctgggagtggcactctcaggtcatgtgtcttcttctctagaccttgatttcctctgaaggttcatgaagatgctcgtccttcactgcttgcttttaggtccacctttgctgtagtagtctccaggcgccccaccacccgtgagcccacatgtgggaaggagggaggagctgcagagctgtcagacagccaggtggagggaagagagggcaccatggggcagaatccagcaaggcttttgcttgttcattcatcaggactctatgggtgcagccaagctaatggctgctaacctaaagcctggagagctctggcgtgtcaccacaggagacacggtgatggcgggatttactgaaccatattctgagcatccattgaacaccttatctgggagggtctggctgggacaaaggaagttgtggggtttgttaccatggtacttgcaaaggcccaagctgcagagcacagttgtctaggacagaatcgttgctgaggcacaagtattcttccggggctttatggtggatcctgcactctgcatggaagcctgttctcatcatattctggaaggtctgctcacaacagtgatagaggctgggaagcattcttctagtggctacacttcagggcaatgacacgtagttgcccctaaagctttggagaccagacatgctgggaagacagcatgtttgggtcctggactcttcttggctctgttgctaacacattctgttgagaataagcttcacataacagccagaaagggttgggtcagggccaaaagtcacaagatcagtagttagcaaatgatgcctgtttttcaagccatttctacaaaccatccctcagttgctccttaccctgggctgacctctaacactgactcaacagtgacaggccaggtaggagcaggagtagtaggtagttgagactgtgggactttctgagggaagaacttctggttctcagaggaaatagagtggcaggaccatgcctacttatagtatgtgaggcctctgagtattagctcttgacaaaaagccgaagatactctctttagtcatctgttcttcaactttcctgtctaattccccctctccccttccctcttttctttccttcctgtcttaattaggatttccattgctatgatgagacaccatgatcaaggcaactcttataaaggacaacatttcataggggctgacttacacattcagaggatcagtctgttaacatcatggcaggaagcatggtagtgtccaggcccacacagtgctagaggagaagcaaagggttctacatcttgatctgaaggccacaaggaggagactggcatccttaggcagctaggaagaagctccctaagcccacccccacagcggcacacttcctccaacaaggccacacctcctaatggcgcccctcactgggccaagcgtatacaaaccaccacatgtcctcttcactgggatgatgttttatctctccctcccttcttccctcctttccatctagaacatccttgcccatatatgctgtttcagaacctgagtcacgttttagagtccctataggcctgaggcttgtcccacatggacactggcattaaagcgtccctgcacagaagtagaggttaaggaggccttcacagggtatatgcccaaggcctagctgtgtaactacttatgatccacactctctgagtttctaaaataggtgctttaatcccatttgagcaccataggagcagtggccctcctggccagccagcctcctgtcacaggcttctgctgccgcctgagaaagcccagagggctaaagcttgctcagctgttgccagaaaaaccctggggtttgtttgtttcctattccccagatccaggcgccagccacagggatagactgagtgtggcctgtcaggaaatccaatgtactaaactttgactgtgtgtgagactggagttcagcatgggatgtttgggtggggctgtggaattcccactcctgaagcccccccaagcccagggaaaagtcccttgcattcagttcaggctgtgtctaccctgttcccctcccacacaaagattctcctttttggattctcttctccttctggctcttttcctgatagctagctaccttgggcatggacatgatcactgcatggtgtgtcacccctctttgaatacatggcacagtgatgtaggacaacagaagtggagagagggtactgaaggccagattcatggcagtctgccatatttaatagaattatttgctttgagctgtgtgttctcagctgggtcaatgcacctttggaaagagattttgctccaatttttctcccaagcctgtgtgttcagcacttgcccggggggtgggggtggggggcagtcagtatatagcagacagaaggtgaaggtttgagctgcagacgtccagaagagatcacatcaagtagacacccgagcatggagctaatgtccctccagcatgggctttgtctctgactctgttctccaccaacagatgaaagatggaaggactcacccacagcaggttagggcctgtgtgaccctcaaagtgcaaattggcaatgcggcatcagctacttgggattgtttctcaaaggtcaagagacaaaccctactcttcacggtgcccagaagggtgctgctggcatgacctggttttcttctcttcctctctccttttctcctcctcctgtccttcttccggtccacatttgcttcctgtgatttgccgagccttatgggtgagttccacaggatgaatagacaggtaggggtaggttgagtccctacctttaattgtattagcttcaagaagtcagggccccattttccttccaggcatgtgggtggctgtaacttgccatagtttctaggaatatccatcctgtggcaatgtattcccatttgaaagaaacatgtttaaagtagggcatagggtgttaaggaggagttaggtgcctgtctctgagattaggaaagaatttcccatttcctacaaacagcaactttgagaattcctacatatatactgttaacttttgcttccaatgttcatagcctgcagcttcaaaggagttaggatatctatgactctaagtctggcctcatctatgcctagagaaagcatcagatttctaagtcttctctttcgtgtgtgtcctcaacttctccctagttcctctgtcccttgccttccctgccccctgcccctctgccccaacctcaggataatccatcatcggtatcccactgggtgtttacagagcactccacagccattgttggacattttctctcttgtttgcaaaatgctttgcagctattattacaagactatcctctcagagtctatctcatctcagagggagatgctgacccactctctagggtcaattcccactgccccgccccccagtgggaggaccaaacctgtactggggaggggtgggagtgttaggcaggctgtcacaggctggagccacggctgagccctcaacttgccctctgggaaggtacaccctgcactttatggggtaaagagtaagaagtactgacttgtggatcgtagctggggcacccattctcccccagagtaagtactaagtagcagagatgggctgcattcttccagttcctcagctcagagggaagggggatttatttctgtgtcctacataagagcataaaaagctcccccaacccaggtggtgcttgcttgggaatcatatttcttctctttcaaaatgagaattttaaaaagaagttatgatgtcatagagcagcgctttcctgaaaagagaagcccccacaattagtcccagcaaagctgctttctggccgcctctgttgccaccatgctgcagggcaccttgcatgttctgtttctcattttgcaagtcagagtcagcatcttgcacctccattacatcgcctttgtattaatcacttgaggtttccctataggggctggagagacatcacagtgagtaagagcactttgttgctcttgcagagtaacagggttcggttcccagaatccacacggtagctcccaaccatcagtaactctagttccagggggtttgatgccttttcatctttgcaggtactaggcacacacatggtacatatacattcatgtaggcaaagtgcttatacacacaaaacaagtcttttttaaaaaataaaatacccatgtaacatttcaccgaagtggttgggtagtaagattttgtggtggactccatacacaggcatgcctggctagacgtcttgaggaaacatggtctttgcttcctgccctgccccctcctttggctgctgagtggcactaacaggtctatctgggtgggacttccacaattcctatcctaggccaacggtatctgccacgaagtccacagccagttgacagttctgaaaatggaatgagtcatcttgtcgctcactattgattctcagggccagtctgttaaccccgaccactagcattctgagacctaggcaccctcttagctcctgtggcatctgtcagcttgtttaaatcacagatgtttgctaaatgtgtctgggtgatgaatgcatattcatcaatgtccaatgacttcacctgggtaggaaaaccactgttagaaggcactgcctggtctttgaggtgcactcgcagggggttcctcaagtcagcctttgtgttgagttctcagagcagggatggatgagtaggcaccagagaggacacatctatggactccgctaatttcctttgatatgcatgtacaggaatgggcaaagtgtgagggagcgcgggaaagcgggatctcccttctcacaaacagcagtggatcacaaggggtttttaccctagagttgaaatgaaccagagggggaaagaaactggcatgagcatctttaaagggagagtatggagttgaacctattagagaaacattgtggtcttggttacatttagagactgtagtgccatctagtgttcatggcgaacaaaagcctactgctaactccctctcagccctgctggcttctggctctgggaactcctgacctttctactgttctcaggagagggcttgagaggaaagagccaggctgacaggctgcagatgacaagctgctggtgctggtgctggtggtggcccagtagagagcaggccatgggcaagagtcacctctagaggcaggtgaccttgatgaaaggccttcagtgtgacacaggtgtaaaaatagcctctgtgctgacttaactccctggcttgagcaaacggcccctcacacctgtatattgtttgcttggcatagacacactgctacctgtttgcaggtgtaaatgactgtttatgtacccagagttatgaggagggtgccctatccgtttccagccaacgttctcttagtacggattactgaacagcagagctggcaaaccccagacctggggctaaaggagggaaggacctttaaggggtccacttttaaggggtaccactggctttcccggagaactcagcattgcctttggtatcaggaaaggggtaatatggagaccaaggtggctatgcttagggacaaaaaaaaaaaaaaaaaagtagatggcatgagtcagagagaattctggaagcttttaactaggcttaatataggtcaaagggaatgagaaaaccaaccctacctctctcacttggacaatgagaagggacatgtgggctccgccagttgtagaattctgcagacatggaagataaaggggaaggtttagtgaatggaaggatggcagagggtgacagccttcttctggtggagggctgacacttacatttgattgactctaaggcactaaggattttggtctgtgtctttattatatgctccatataccaagaaaagggcaaacaataatatcagatcatgcatatggttacaatgggatcctagtttcatttctgttgctgtgataaaataccctgacaaaaagaaacagaagagagaaaggggtttactttacattacaattccaagttacagtcccatcactgtagggagttccaggagcaggagcttgaggtaacagttcccatcacatccaccgtcaagagcagagagaaaagaatgtgtgcatccatgcttgcttgcttgcttgcattccttttctctactcttgcacagttcaggactccttgcatagggaatggtgctgcctacactgggctgggtctttccacatcaattagcttaagacaatcttccatatgcatgctcacagccaatcccatgtagactcattgagactctcattgagactctcttctgaggtaattcagttcgcaatagttctgtgtcaagttgacagttaaagctaactgtcacatgtgggaaaactaagaacgactcatttaagaatgtaaacaaaactctagtctccctgacctagacaatctccttctagaatagaattcagagtaataagcagaaactcatagatttacatacaaagagacccatatttacaaaacaaatgccagaaactaggcagggattaagcagctattgaagagcagaagcgaaaggtgaggaaacatttcaatgatggacaattacagtgtgatgggaggagtttataatacacttccaatgtggtaacacattagggcagtaagcaaacatagcaaagcaagataggcttgaccatatcagcttgacctcaactaggcaaaaacatgtgtcaacactggaagtcttacaaaggacagaataaaacgacacacccacaactctgctagtgacctgtactttctttatatgtttcagtattaattctcctacagtgtaaatacctctacattccatcacacacactccaaaggaacaataatcagcatgagttacttttgcaattactaggaccacgagagctagggaaaaaaattgcttaacagataacagagttattctagcttatgatttcatagggatttggttccctgtggcaaaggaatcatggaggagtgggtagggctgtcagtatactgtggaggttttagagtaccacagaccagaaagcagggagagcacatgaggagcaagggtcccagtgtaaccttgagcttctgccagccgggctccacctcctagctgggttccacagcctcccaaaatagagccaccagctggggaccaggtgtccaaaacagaaggctgtgaggacagttcatgatcaaatcatcacatggccatacttttgaaaaggaaaatgaagaaaagagtctgagtaggttaggtggatactataaagatgtctagaggcaagacatgaactcaaaagggtcccctagaacctgagcagctgatgactcttatcttaaacagccctggatggcagagagtggaacccactggccattcgggcctaagtgaggaagaatcagtctcccgggagacatcctgccctgctttctaggtgaaaggtctctgagcaaaacaaaccatttgtgtcttttctcctgtgtcctcccccagtagatatgtttgatgacttctcagaaggcagagagtgtgtcaattgtggggccatgtccaccccactctggaggcgagatgggacgggacactacctgtgcaatgcctgtggcctctatcacaagatgaacggcatcaaccggcccctcattaagcctcagcgccgcctggtaagtgagcatctctatagcttaggtccgccagcctggagagcagtcaggttctcccctcctccctgaacttggctttgaggcttgaaggatataagctgaggggttaggtatgtgggaggaaggaaggagcctctcacactcttagagtgaacttgcactcgctccaaagatgctggcccagctaatctatcacaatgcaatagaggaaagtgaagctcaaaaaggtgactggcaacagacactggccatgagaagccagacccaggtctcctggactccaggccctttgtctcgaaagccaacgtaaaccaggatctgtcttattttcagttgatcccctagcacgacccagagtccaagaaggtaaagcagtaggtgtgagtcctggttgggaaggcctagaactggggccaggtatttgccacctggatctctgcgctctctctctctctctctctctctctctctctctctctctctctctctctctctctctggtgccatctgactctgactaataccaaccctggtgtatggcagggaaggggaatagagagctacattctgaagcttcctcattgaagcccatcaaactcctcaccctaaacaccccaaacgtcaggccctggaattcatgaattccaccttggggaagaattttttctgttgaccgaggctcccatctgtttctatgaattgtctagatacccagagatagtgctaaggctagcccaggggctcccaagggactatcctggcctagccctgctaaacacaaaacacttcctttctatgttgtagtccgcttcccgccgggtaggcctctcctgtgccaactgccagactaccaccaccacgctgtggcgtcgtaatgccgagggtgagcctgtatgtaatgcctgcggcctctacatgaagctccatggggtgagtggatgccctgccctgctgtgtctatgccccacctccctcatgccctcagctctgcctgagaggagcattctccactcccattctgcaggtctcactgctcttccctccagaatagaatccacttgctccttcttttaaaaaccttcatttatttgtgtgtgtgtgtgtgtgtgtgtgtgtgtgtgtgtgtgtgtgtgtgtgaatactataacagactcacaactggaaatccatatttaattccaacccttcaggttcccaggcctcttgcaatgcggaaggaggggattcaaaccagaaaacggaagcccaagaacctgaataaatctaagacgccagcaggtgaggaatagatctgtgtgtaagcatggaacaagtcagaagttcccagagcatctgagaaccatgtctgctctggtaggcggccaccctcggcagccaaggtacgatgctaaccccctcagttctctcagagcacagtaataacccagtaaagaagtcagcacaaggaaaccctatgacgactgcccttgcaataggctggttcaatcagtgtggggccggagagagaaattttgctcagtggtccatttttcaagctttaatcaaagcagacaagttcccattagccgtgctcctgacagactgatctataatcggggtacatgtgtatcacatggtgctctgaacttgtacaagttccttcagggatcctctcaagaccccacagaagcagtgtcatcctatcttcctgagaagcaaactgaaagtcaagtgcaatggcctaaaatcacattgctattgactgggatctggaatgttcactccgggatcaatagtctagtcaatataccgttctgttgtcacagtctctatgtagctcaggatagccttgaactcacagcccctcctgcctcagcctcctaaagtattaggattataggcatgcgccaccacgcctggcagtgccttcttaatttctagatcaagaaagtcactaatgtcccctacccagagccctctctgctgcacactgccaaattacagtttgccgggcttcagttgcagaggaactgaactggctactaagatggacagttcacttctcactgcagacagacagactcaccaagttgcccattgatactaccaaaggcatggccatcattccggtttcctaaattcagctggagctgctgggagacgtatttcctacctgaacctcctcccccacctcccccacccccagggtcctgcctctttctgcctcccagactgtgactacagcagagcccctgggtaacctccctcatcctgtgtggcaggcacaggaagaacaggcactgggttcagtggagtagccctcaacccctaagtggaaatccagaaaagtaaattccatagcagaatctgttctggagagcacagggcatttttaatctcgactcatcccaagcagtgtggctatccacacttcactacagagaaattaacacagttaattatgagttggcgtcccagaaccctctggcagtatcctgcaatatatagtatttgcatttaagaagcagtatcaagagtgtagaatcccaaaatacaacgtggtctccaggatcgcctctcctggatctagggtcgtgagggaatcagagacttttgaaaaggttcccttgaggctggtgatgcagctcggtgggtagggtgcttacttagcatgcacaaagtcctggcttcagcccccagcattccataaaccgggcatggcggcagaggcttgtaaacccagcccttgggaggcggaggcaggaatgtcagttcagtggcatccttacctacacagtgagtttgtgaccagcctgggctgcagcggtttttacaagaaggtaaaatggtctccttgggattttgatgcttctgccctattttgagaactgctccaccccccaacccagcaagtataaaaaaggcctctgtccctgtagctggactgggtctcctgactctgcctcctcctttgcaggtcctgctggtgagaccctccctccctccagtggtgcctccagcggtaactccagcaatgccactagcagcagcagcagcagtgaagagatgcgccccatcaagacagagcccgggctgtcatctcactatgggcacagcagctccatgtcccaggtgggcagggggacggagttgatcccagtagccagtcttgccttgggaaatgagctgtagactggccctaagctattggcctccaagcagcccagcctctgagcccttggtacctcttgtccagctccactgatttagacacaaagaatatcacaggcttaaggtttagcgccttcctgtgctgggtggggcctttgggaacaaggagaaggactcagggactgcacccggggtgcatgtggcagatagtacaactgctccctgagtcagtcttgagtgttggggttggaagcagatttggactctagagcttgcagagctttgagcctagccttgaaggattttcagaggaggaggcaggaagacggtgtgagcatgtcatagacttgggaaccacagagggtgggaagctgttttcatgagctctaggttcccgagagcctccgagtggccctacaagggaccgtgccctcttgcaggtctgatggcacctctgttcctctgccttttaggggatgaggaagtcacaggttccctttcccagcactgccacccaatggttgagaattctaccatcagagtaaactagagagaacctggctccacagaagtgagagtgctagaaccctttcaggtggagcgggtgacctcagttggacccagaagacctctatctgaccagggagtggtgataagagtgtctcctgtggctgccagagctttctgagaaagcacagcagcacaaaactcctgggttgtacctctggttacagtgctcagaagccaacgtggaagcacacagaccctctgcggctggaccctagggcctagggaagcagctagtcttactccctcattccctccccaaccctggtcctcggatctccaggagcatcctatggctcactgtgctctctgccttccagacattcagtactgtgtccggccacgggccctccatccatccagtgctgtctgctctgaagctgtccccacaaggctatgcatctcctgtcactcagacatcgcaggccagctccaagcaggactcttggaacagcctggtcctggctgacagtcatggggacataatcaccgcgtaatcagcgcccccccttccctcttcaaattcctgctcggacttgggacgtgggggccagcaaagtaaaaggctggggcacccttggccagcccctttgtctgggaacaactcctgaagaacaactgggtagaacttgaagttgttgacaatcacttagggatatgggtgttccgggttgttcaaacacctttccaggtggagcactggaaaagcctgcgttcttacagagaagcccaccttggctgcaagcacagcacagtgaggcaagagacttcttccttccttattctccacctgcctgtccaggacagacacataatctccttcaccccagctccccacccagttgtggtggtgggtttttctttgtgatcctagagtggctgtaggggcggaggcttcaagacaccatctacagtctgagcagggtgtctacttgttgtagactagacatagaagccctgcccttgtccaacactccccttgcttgaggcatggcacatctctgcatgtcccataccagatctgactccaaagtgctgggttcaatgcagatgttactgaatgcttcctggggagattaggtgaggggaaggcacatcacccatcacacagaatagcttcatcaaatcgcagcctggccatggtgccttcccttcctctcccaggaacatcaaaccccttgctctccagcctgaacatctaccctctgcaaaagtagagcccagttgtgcagctaatgccactaggtgctatatcccagcatccttttcaccccttcacacacaggggttccaaggaggaacaaaacctgctaccaaagcagccttggtgactatggctcatctgcacctcagggggtgggggagggccctctggaggttgtgtctacagcacaatactgttcccaggactctagcttgcttgccccgagcctgccaagccaagccctcttaagtcagacagttacctggctctgggactttctccagcacagatcctttgtctagaaaatacagactgtttgcaaaataaattcaaagcagaaacaactaaaggaaatttgtgaaaggacaaaggtgatagacgggagaagatgtccccagggctggcgggacagtcatgatagcagctgtcctaggattggcctccctcccatctcccaccattactggggctcccagagattcttccttgtcctcatcacccacagagctgtagccaactgtggcattactttattttacccaaaattcccagccccacccctaaaccttactggccgtagcagagaatagcttcgaaccaagattctgttgtaatcattttcgctgtttctccctcaaggccgccttccccatgcctgcccctcctccacaacccgttaacattgtcttaaggtgaaatggctgtaaaatcagtatttaactaataaatttatctgtattcctgtttcctccg

SEQ ID NO: 75 - DNA, 62954 bp, Human
ataaaaccggtcggtgatgccgggtggatgggaacaaacttcagaaggaggagagacaccgggcccagggcaccctcgcgggcggacccaagcagtgagggcctgcagccggccggccaggtatgtcacccaggggttagctggaagctggctagcagtgaggacgggggatggaagaaaggagagggtcccaggatgcctggcagccttttccctcccaagttaaacgggataagactgggacagcggagggagtgggcacggaggttggagtctggagcttcttcagcgcactcccaatccttgatcctcccgggaagcctgttagctaggctaggctgaggttggccctacttcgcctaaaaatcctcctactcctggcagacgatgcaggtgtaaaggatgaggcctggggagggggcctgaggatgcaggcatcgaatctcatcgcatctcatgcccttctcctgggtttgtgcagggcagcggcaggcgcggcccggacctacgggaggaagccccgagccctcggcgggctgcgagcgactccccggcgatgcctcacaactccatcagatctggtaagaacgcggtgtggtcaggatccccgagcccccgcgccgctgagcgtccgtgcgtgcgctcgggtggttggatctcgagagcgtcagcacgggattcgcgggacccacccgcgtggggacccagctggggcgcctggggcctggccctccgctggagccgcctcgctgttctcgggcactggggttccacccggccagctgagccgcccttgcccggtttcgagggaccacatggatcggtgaggggatctctgtggagttagagggggtttcctttgagctccattcccagccttgcatggcgcattagtgtggacattcttcgtgctctgtccctgggctgcaccggtgctggacttgccgtttccccgtccccgacctctaagtcctcttcctcgggtgcgcgcagtccttcccagtgactcccctggctggactgtgagctccccgcatctctcaagccaacggcaatggagccggtggtcccgggcccgggagccggcagcgcactcaggtgctctccgactcctcctggcccagcaccgggcaggccgggcgccgcgcgcggggcgtccggctggtgaggactaagccgctcgcggagtcaaaaccccctccccacctgcgcccggaagcagggccttcaaacacactcgagctcccaggccgcgatgcctgttttcccccttcccggccagggctgggcagggtctttgctgggaaggagctccagggtcagggctggtgggcgcagccgtcccggcgcgcagcgagtgcggacagcggtggaggcgcagcgcggcccgcagtgatggatggagcccggccggccgcagagaaggcgatttatggggccagggcgcatcgctatcgatttgggccggcgaagtgagaggaaatcaatatttcagaatgaattctccgcgaatatgatgtcccgctctgcaaacgggacatttgttataataaggagggtcggatcgggcgcgcagcgaggctgagatctctatttagccaagcgcactgcgggggcccgggctctgcggcgcagtctccagtcccagggccatggcccaactaggaggggagcgggaaccccctggggcgccggaagatttctcactcgggttctctctagagctgcagacgaatgctccctcccggcccccattcccctcagagacctgggccagaatcgtccggctgcccccagaaggcgcggggtcccttcaaggtcctcaggggagagacctcgcagccattccccggcgcggcggggttggggagccctgggaccgagcagagctccctggcacctctttacggtccgcgtcctggaaccacgagcgctcctaggccactatctaaggtcaggatcaggttttagtcccttaatctttagccaaaccgtggtacgataccagacatcgccaggaccatccctgaggcctaatgtgcagtgcccggtgcccatgccaagctggtgcaatggcacttctgcgccaagctggtgcaatggcacttctgctcggctctggaggtccatctttcctcctaaccttcccctgacccttccggcggtggcaggaggagtgagtgctctcggaaatcaaattcactgtggccgggctggacccttactctctgccgctgcccaagaaatgagacgatgtccccgtccctcagatgagctttttttttttttcgcggctacttattttcattctagaagtactcgttagaatagatggaaatagagtatggaaagaataaataaaggcacaatttatttttactgtagttttaatcaggaacagtcccagatgatgagatgcgcgctttcccactagcttggatgcaaatcgcgcttgggttttgggagggagccctctgcccctggacctaccaggtaatttttttcccctttcttcttttcgggaagacagaggggcttcttctaccctctttccaaaacaaatagacaaagtggcgagggagggaagatgagactttcttctcatagtttaatttaaacgctaataaaacaagaaaatggcctataaccgcatagactgctgaaggcgctccctgtttcttttctgaaccctccctcggcaaacctgagggagaggccgtctgtctttctgatcagcttacctgacactgttgtctataaccggagctaaactcataagcggacccctctggtttttacaagcccattatctctcgggttttagcaggttcccccttttccccaggcacctctgttcctgagaccggccgtgcttagggagctccccttgagttttctgtgagcagagcccgggacgcaggcggccacacggctttccgcgggagcgaggccgagcgcacccttcccaataaccggggacgctcgagaaaacctccccgcgcggcctccgccgcccagcctgccacggggtcgcctcgtcgttggctggtcttgccttgcagagagtcttaacgttgtctttcctacagctttattctgcaggaatgttgaacgcgaatcattttaacgtgcgcaggtcagcgatgggctgaacgttccttaaaatcgctatttttgttgcatcagggacgaaattctctaaagcaaaaacatttttaaaaaaattcaaagatgcagaagaaacgataaatgccccatatatataaaagtgaaaacaatactgtaccaatgaggaagagagttttgtaaaagcaagcaggctggctgtcattaaaagttatcttaaataacttgtcgcagcccactcccaccagtcccgaaaatagttcattcaagtggtaaaataagacaaggcagaggacgatgtctctaacttccctgatgtgagatctaaagccccattcctaactcttggttttagaattgaggaaagtggaataaatgcatttggaaaggatctgttttcttcccaggtttcctgcctgggttgaaaataaggtttcaggggatggaagcaactttgaggaacataaagaggtattggggttcatcaattcatctttgtttcaagatggttcccccccaccctccacaatgcaagttaattaggagataatttagctaccttgtgaattagttttaagataagtatctttttaagctttgtcactttaattgccccactgattgataagaagtaattatttctaattgacacttttttgatgtctattggaagcatttatttggaactttttgggggtggaaggaaagttaattaattttatcagtctacccccaaaaggactctgcctaattttgttgaagaagacaaaggaagtgaaggaaaccaaataaaaaatcaatctcatggaattttaattactaagggacactttggtttaaattagagggcatctactaatataatatgtcaaaacgttctatttatggcctcaaatctctaatttattgagatgcattttataggtattcattttcctatggatacactcaacggccctttatatgcttccttcattttggagcaggttcctctgctgtgtaaataatttttgtgaaaagtaaaatctgtcaaacttggtatgcccagaaaaaatgaaatcatttttgtaagagccaattgtaagaaagatttactaatagtcatccttgttctgtaattattgatggagttgggtataaaggtgaaactttacttacagtgacttgccttttcatacctaaaccttggagtaaacagtttaatcattcacatcctccagaacattttgctgtgagagagaaaggagtgaaagaataaggagaaaaagaaagacactgaaaggaggcaatgggggtggaaaggaaagaaagggagaaggtagctggagagaataaaatgaaagcattcatttcagaaatgaagatagccaggtgcatggaacctttgccattcaatataagaaaattgaaatcctgctttcaaaatacatttttgttaacaccaaatctctaccacagtctctaagcaacccctaaccaccaagggatacccccagttttctaccccttaaaaaaaaagaggagaattttaggaagctggctgatccggatcttggatatctggctgtcaaagtctttatctggggtccatgaaaaggaagtaagaaaacgcacattgtgctctgggatttataaagagattcgagtgttgtttatgtttattttattattaaagcccctgtgatcttcatctccattttgtatgcacaatcttttcacagatcgacttgtgacttattgatataggaaagcattcccacattaacccaaagtagagacacacacacacgcacacacacgcacgtctggaatgagagaaacacaatcacacaggacgcgttcctgtcaggttaatttcagccagtgcctttttcaaccatttattgtaaaatcttgcctgcttttattgatgtttctccctgattatgtggagctgcaagaatgaggaaatattttaaatgaaaaataaatttaagacgtacaaacatcagataatatcacataccaacctcactattagtgaaattgaaagagtatataaataatgcaaaaaaaaatcagcaagggagagtttagtaatggaaaattccctgcaattaaatgaaacagtaatttagtgaagatatgcctcaatgaattagcatttattaattggttctcataaaaacaatttgtgtgtgtgacttggggagggggatgtttaaagtatatattgtccagagataaagttcctcaaatattcatatcaaattatgtcgttatcacattctattttgtgagaaatcccaagtctctcactggcaagttacacctgtacacagagagcttgaatgcaaaggaaaggattcccatctagatcaaagagtaaagctggttcccacttctcttggtacatttccaaatgtgaaacgaatgagggacacactggcagagtcttctatgcttaggaacatccaaaccgggccgcaagaagactccctgaggacccagctcttctggggcacagctagctaagccagagctaagccagggctggtttgtggttctggtcccccagcctgctccagcatcctctccggctcaggcaggaactgcagtttgtaatctcagcgaggagcttgctagggttgactggtgcatggatgtgtttactttctctcgccacagttggtctgtcttcagttctaagcattttaaagctgctctatttatcagtccaagaagtgctgagttctccgttgagctgagaagctttgagctctatggttctgagtacacgagaagccaaaagataaaagaaactgtttcatttaagaaaaaaaatgttttaaaaagtgggggcaggggaatgaatgagcccaccttcaagactgcagattagttttgcttttgttttagttgaaaacttggtgcactgccccccttcgggtcctcattctcttcagagatagaatttagtattgaaaacaccctctaagagaggagaatatgccctcacgttatcttctcttagagggtgtagagttctttgcgggagggattctttccaaatgcagattggaacaccttcttcgcccaggttcttctggggagggagctaacacattctgcctaggaaatgcaggcaatgactactttcagcaggagttctagacattcctttcgtggggaaggagtacagagcatgacaatccaggagtctcttggctcctgaaaactccactctgccacaccaatcctagttcatccagtcagtggtcagtgaccctgggatggatggaatctctgcagtgaggtggagtaggaagaagcatccactcgtctttgtttatctacagtaatgacacttttaaatggatcttgaggattcataattatttccttaggtccagagttagggctgacaagactgtttgggttgctgaaagcccctctagaccccttcgttggccagatagaaatacaatgagcaaatttctcttatataagccactggccagaaaaatattcataggaaggcttctgtcttaaacctgtaattcatgtaactgagtctgggctttaccttgcttggctggtgggggtccttccccaggaatgagtctcgatagaaaccagcatctgtttactgaggcatgtctaagatcaaggggaagaaagtccaagagtccccgaaggatacttgggttctgtttctgtgtttcttcccgtggaccctccatagtcctgaatgccatataagatgccagcaatccctgtggctcagccaagccagcctcacagctcctcctgctctgcccatgtcacatttacatccaaagaaaaagaacgtctgcacaagagctgagcatacctggcacttagtgagctctcaatgaatgaaagctgtgattcttctctctgaggactgccacaggtgtggtgtggtgctgagagcagatgtattcatcatctcatttaattctcacaactctgccaggcaggtattgctacgacatttttatagaagagaggggaaggaactggtgttcaaagaggttgataagactccaattcccctttccactgctccctacctcaaccacccaaagtccagctcatcagaactcggctactagatgatcgacacctggaatcctagtggaaactcccatcagaacccttgataagaaggcccaagtgcccgtgctggcagtgacaggcagagccttccgtctatcagcttgctttcctcatcagtgttccccactctccagtttaattaaaatacacccctttccagtatggttctcagtcttcccatctgtgaaatggagaagtggttcctgcctggatgcctctcctagaagtagctatgagaaggaaggagatgatcagccacttggaaaggcagagggagggaggccttactttcacacatccccccaaggctgccgtgtctccatctgcactggaaaaaaagcagctatcctcaggcaccacaagttgaaggaccctggggaacttacttccctaacttggcatctcccaagcacactcagcctccctgcctaggttcatcttggatgtgatgcgaacagcttcagagtggctggggaggcttccccatgctgttaggggccagcactgggggccccatccacaggcagcatagctaggagtggtggccactggaggtgccggttgttatgtcccaaagcttaggttcatcccctctgccacttcctcaggatccctctcactcaggggcttaaaagcaaggcatttctcttttggagcctctgcagaggttcagttttagaacgttagcttgaaagaaagggattttattttaatgttttcactttttcatgtagaaagtagctgcttagctcccgggctctcagatgaaaacctctctttggtttaagcagagggagagattgagaaagaaaaaataattcattcctccctgcttttaactttttttcgtcatcttcagccacaatactcattggttttgtcttttttatttgtcttcttaaatggccttggggtgacatgggtagttagtgctaattagtccactaggacatattgtgactgtcagggcagcacagcagaagggtccaggagctggttgggtgacgcacctaagagagaaatggcttaatctgctgtcatcggtgtgtactacagtgttcgcgcacacccaggccctctgtgtgttgcagttttgattcttcggcatctccaggaggacagtagaacttattattcttgggataaactcaggggccatgaggtgtcaagagaatgagaggcttttgaaatcagcgtgaagccaggatgaaagcccctgccctgcaggcagaagaagaaggcaaagcccgggcttccatcttggcccagaccttgctgtttttgtgtgaacttagtcaagtcagatgtctctctgggcttgtacttcccctttataaaatatggggatgctgcagggcttctggggagtcatgtgagtaaaacctgtctcctcacctggcacatagctgccactcaagacaattttctgtgctccatgtagtagtcaccaaggagtggagtctccagaacacattcccaaagtcccattgtcgtagtatttcctgtgaaacagccaccagtaacttgcaacccagtacttcgttccatttaaaatttaggacagacttttcaataattcatgtggacaaaataatagatctaccacctaggagtactgggattaaatgaagggacgcatagaaagtgctggctatgacctctgcggctgttatctgctgttaccacagcctgaaatggaaaaggatgccttagttcaccttaccagaaaacccagtcatagggaaaacactaagcttttgatagaatggctgtctgtggactgtgtgttgaaatccagaacattctaagggtttaatagagttggtctttgagcaaaaatgagctcaagtgggtttgcagttatgctgtgtgtgcggctaagacaggactgcaggaagacttgcctggggtacttgtttttaattgacacggaatcatatatttatttttaaaaaattaaatccacgtatcctccaccttctgctttcttctctctccctccctccccacctgcctctgtctcacaattttctactttgggtaataataatccagctttggcctgatagcaaaccctggttgacatttaaaagtctctgtgattagctgagcaccaaatctctgacttaagctttgctttgctcctttgcttcaacactgagcaaggtagaaggcacctctacagggcagggagctggagtcttgctcttccctttcaagaaggcagacccgcagaaccaggaggaagaatgatcagacaaaacaactcagtggtaggaaaaggactgaacactaacaacccattcggcaggagcaccaaagttcatttttcttgaacagtcaccccagcacaactatgttgtggctgttgacaggtaaaccccatctggctttctccagtctgctcctcattgttccagagccagtgtgctccatgacggtctacactggggctccatctcagggctgctggacagtttgtggcaaaatgtggcagggctgtaggtagaagtgccatggagatacttctgccaaatgaaaatgcttactggacacttccaatgcctaggctccatgccttcacagatatgcaaactttcccctctgtaggccttacatctctttggcagtatgaaaagacctgggtccttcgagccttggggaccttcctgggccccccatattccctggggacatggcagtaccccataccaggaaggtccccatggcccatggcccacccccactgctggccatggggctgtctagacaggtgccccacactgtgacaggcctgcctgggcctcagggctcccccttttgcaggtggcacctgctttcaagggtcctgcttacagtgacatagctgctgtcctgagactctcctttcctcagggcctggctgggggccatgccatgtctgcaaagcacttggtcacgtgctgcccacattccagctgtcctcacccatcccagctccaaagccacctccccatgaagctgtccatgattcctcttcctcttccccacctccccaaggtctcctagcactctgtttgtacggcatgccttgcagtccaatttttggagaaggcttgatctctgtggctcgcagcttccagacttgagttacttgagtacctgggacaatgtatgcctcgcacatctcagaagcttcataggctttcattatgctggtctacctggatccagagttgttcaaggctagagggggctcacagatgagattctgttgccacatcttaccagtgaggaaactgagacccagagaggtatgccccgaccctggtcccacagcccttgtggcagagcagacactccatctcatcaccaggactctttccatgaccctgtggtgacttccagggcatgttgagttagagtgagggctgacccaacccagggagcctttgctgtggcctgtgctgcataagcaggacccaaggaaatgaaggggcctccttcgcctgctgacagggactgggaagcccagtgacagctgctgagacatacagacacacacccatgcacactcacatgcatgcacacacatacacagcatatgtacaacactcacatccaaacatacagacaaccggggggattagggtgaagcaggaaggcactcaaggtgcaaaattccaggaggctctctctctcaggctcacgcaagggcagggttggccctgagagcaagtgcctccttagatcttatagcctggacacctggctgtcctcattctagtcccctgtatccatatgacacacacagtcatacccagttacacacacagaccacagtactcacagacatatacatgcacacatgaatacaatattccccatctcacacacataaacatactaaaagtaagcctttaaaatgtagaagtatgtgcagaagactgtcctaggtctgtgggtaatttaaaaagaccagagaaggccctgctttcagagaccctgagaaatgcagctgggaagttacaggtgtgattgatgagtcccggctgtactcacagttgctagaaaggaagtcataatcgatgcactggggaaagtagggtgtaagctatccaggaatctgctctgtgctatgcatctatttaggcatgaggtcactgacatgtgacctccctgttcttgcaacctgtggtttaaggtctgagtagaggaataccagtgtccaaccatgagcccctcctggccactagctcctcactgaagttacgggtcatgggtagtcatggagccctgtagagaccttttggtccagcattcttgttttcacataagatccaggggcagccagtcatttgcctgcatcagcccctagcaccactaggtctctggggttcacagtggctcttcccagatgaggacagagctaccaagtgggcagcagcagtagcggcaggactcatccactcaagaactggcctcaaggtcccccaagaatgaagcactgaaggcaggtggctgccagctagcatgggcaggcctctctgctcagctcaggatattctctctaacattctgtccttgctcagaattcctgggccactctgcgcctgagacccctcagccccaggcagttcaggcatgttctgtctactacactctaaaggagaagtgtgaacacaaaccacagccgcatgcacaacaccgagcttgtttctccacccacatagactgtatttgtcactattatacacaatatggtgccatcatgcatattttgtacatttgatcaaccaatatttatataaaactttcataaacactttcaaacagttttaccccacagggtgggcagaggtgcttgtcaatataataaaactgaacaacagtggtagaaaaaggtacacttgtacttatcttcaagtttaagatgtaaattttttctgttcaatggccactacctcatattatttttaggatctgggatcggacttagcaacacattatgactttcaagaagttgagctcactgttttgtggcgttctttgcagaacaccatgaacttccgggtgccccatgtgctgacaagtgtcagaacagctggtgtccagctgacgtgaggctggacttgtgtgataggcacgttgtggccatagctccccactctgtgaaatgatgagatcgacatgcctccatccatcagtaggatccccagcatggagaatttacaccgtcacccttcaaagaaaggagccaagtcctgggcacctcctctcaccttgactttcctacaaaacacccttctttcttggcaccagtatagcacatgtgtattggtcatttaggagcccaggtgccttgtggcagagtaaagacacacacagaaaggctggtcttttcttactcagcatccctggagcacacccagaacatgatgccttccttgagatttcctttaaagaccctgtcacccctgaggtttccatcccagctacctacagaagtcgtgatttcttttgtctttctctcagcttcacagacttcttggtccaccatggggagggcttctattcccagtcatccactgtcctgtggtgaacctctctcctctcctcctggcccatttctctcccaagtgtgtgctcagtctgcaccatgtggccagatcatcttaggttttgatccagctcctaaagaagcactcactgccccttcactctctcactctgacttcccagcacttgggttttgctgcctctgtgtctggagtgctccatgcaaatttctcaccccaaccactggcatgctcagttacctttagtttttatgatgtgtcctcacccatcctctggccacacaaggctcaagatctaactccaaattatttcaaagagcattattactcaactattcaatttagtaagtcaatgtctactaagcccctcagtgtggcaggcagggagttaggctttggggttatggaactcaggagaccatgcctctgccttcgtgctgacattctagagataggaaagcaaactgaactttcaccataatcacagagagaaagcaaaggcttcagtctagatagacacaaaatgctgagcaagtaggagagggaggcatggtgagctctgaccgggtcagggtgggattccttaaggtggctcagaggagaaaccagccccagcagagatgcagagtcccaggagggtgtgcaggttccaggcaccagcagtcagccctgagggaaggagacagcaatgggaacatggtcagggttcagcccaactgcaggggttgacaagagaagctaagctatggtgttaattccaatgtgccatcagaacgtctgggtaaagtgcactcgatgtatacgttttagggcattttattcacttgtgcatgaaacttccatcctcccctggcttggcctcacgcttctgttgttggcagttttcatatccttcttggctctcttgccacagctgcatacctactgacgctgttgtcttcaggttttgcggtgattttattaagtggaaaagccatggcaataatctgtgatagctaggttattcactttttcaaaatgttctggtttctctcctctcttggctctgtttcagacaaacttaacctggtgattttccaaaataatcagatttctccttgcacttccttttaatccaatcattaacaagccattttcaggcaaactgctgatgtacaatccgagaagactttctcctacctccgtggcctatttcccactatttccgtatgcaaacccatgttccagccagctagtcattgtttccaaaatacaccatgtacattctcacctctgtgtctctgcccattcaatgcagctacctggaacacccttcccactcccactcccttgacaaagcctcagtcaagctccacctccttcccaagacctttttagacaccctttacctttagtgaccatcctgtctgacttcccactgcacctgctccactccctgggtactcagtacttgttccaacaaatgtcacttagcttcttacagtgacaacctgcctctgagctagaaaagaacaagaacccttccagatctctctctatccccagcaccttacacaaaatcctacataaggagtgaggactctacaaatgtctgggctgctggttttcacctaattctccaataacattttttattgcttccttggttgatgcaacttgcacatttgagttttgtacatgaagtttttccaacatgaaatacacctgatcctttcccatgatattgctatattacttttctattttctttataataattggcaatgagggaactgagaaagcaagaaatgcagcctttgagggaacctgatgcagccattcaggccggagctgccccactgggatacctgcctggtcctagaggcatcttgtaggcacagaagcctatgcttgaaggccagatagccaggttgagcagcaatgggcactgggagtaaaaaacactggcaagcctggggagtttgaaccaacaagggaccttcctagtggatgctgggtgtcgacttggcagggtaattggtcagatttagggtgagagcatctgtgaggataaaagattacaagattcctgtaattcctgcagactgggaatacagctccaaacaatatctagcacatagtagacatatactaagtgcttcacaagtatttgtaaaatggatctttcttttcttcttttttcctctccttcttccttacttccttttttttcttcttctttcttggctttagataactgtttctcaagtgtggtctatatcaaaacctcctgggatttttgttagcaaatatggagccctggaatctgtatccttcacaagctcccagggatttttttatgatcagcatttaagaaacactgatctacagcccacccacagtctttcccatgtggagtccctcatgcctgcctgctgggggcacagcccttctttttgcactgtgcctcctcctcccagagatctcccatctggctatgggtagaagcagatcagatttgaatgcagtctcaggtctgcccctaactggctgtgcacatgccatttgagcctccgagatggcatctttatctataaaatggggcaaagtgccagccccacctacctcatgggattgttgtgaaaactaatcctggatgcaaccaagtccaacaactggtgtttgttgaactaaatttaagaatcacttacttgacagtattttggaagggccctgtggatgtcaggtgagtttataaccaacatttagactggatccagggtcagaaagttcttgaaaggaggagaagcctggaggtcctggtaattggagggaatccagcctggcatttggaatatttgctgtgctgatacactgatgttctttcactgaaaaaaaacaaaacaaaacaaaacaaaacattgccacatgatgcaaggatcacaaatggagaacaagatgatgaacaagatggtagcaagtatagtaatgtcaagagaaacaggttttcaccaaaagagggtaagctattagaaaggattttaccctctacttgactgactgaacctgccttacacttaagagtcatttggagggaactggaggggcagccagttaccctaggagagcagcctccaggggctgcccaagcctgctgtgtgaaattcagggctaaagctctaaaactctgttgatctgtgcatgcgtttgctagcgctgcagtgacaaagtactacaaactggagggcttacataatagaaatttattgtttcacagttctggaagccaaaagtgtcaaatcaaggggtcagaagagttgtttccttctgaggctggaggagaatctgttctgtgcctctctcgtagctcctggtggtttgctagaagtctttggcattccttggcttgtgacagcataactctgatattcatatggctttctcactttatctctgtatccaaatctccccttttcacaaggacttgatcatattggattaggcccaccctaatgacctcaccttaactagatcatctgcaaagaccttgtttccaaggtgctagggtggtgggtggagacaggggagagactattcaattcataacacctaagtattgtgtctccttagtccgtttcagtccccacccagccctgacttgactctcagctgctttgggtctgagcaacaccgctgcagaagctctgatttggagctgacagaaaaagaaggggaaggtgacatccatcctccagaacctttcctattgctccaacagaggaggggactccccctcccaagccagaatcccccaaagagagcctgaagtccaggttcaacacttagaaaaggcgagtcatggtggctcacacctgtaatcccagcactttgggaggctgaggccagaagattgcttgagcccaggagttcaagaccagcctgagcatcatagcaaaatcacctctctacaaaaaataaaaaacacttaagaaaacaaaaaggataagcaaacaagctgatacaagaacctaaaatcggccgggcacagtggctcatgcctgtaattctaacactttgggaggccgaggcaggtggatcacctgaggttgggagttcgagactagcttggccaacatgacgaaaccctgtctgtactaaaaatacaaaaattagctgggcatggtggtgggcggctataatcccagctgcttgggaagctgaaggcaggagaattgcttgaacccgggtggggcggaggttgcagggtttcagtgagccgagatcgcaccacttcactccagcctgagtgaaagagtgaaactctgtctaaaaaaaaaaaaaaacctaaaatctttcagggcatgacttgcttcaggacatgttctgcgcaaacctcactttcttcctccactctaccaacatggccccagccaagaagccactaagctcccaaagggctaagacagggatttaggtcagaacgctgaggttctttcttggttctgccatgaggtgaatctgtgacattagacagctcacctctccttcctggtcaaggatcctctcagaagtgtgccttgcaactctgccactccacagacactgtgcacatccaccttcatagtctgtaagccgtggcagcccactttgttaccatgcaagtcatgtggcagcccataggccccactgtgtgctaccttccctcatcttatggcacgcccagtgtcacccctggtgttttgtcacataggaaggttactcaatgtttccctctagagctctctctgtaccagcttctgggggtttctggcctctgttccccggctgagggcagtcccagagttgtagacattaggactggaaggatcatctgcttctgtcaagccagatgaaaaaactgaggcacagactggcatcgtcacagagtgggcagaacctaggcctcctaattctcagcaccccctgtttcctctccagaaactgcagcctgcaggctgcatctgctggcctctgtcccttccccttttcttctgcagcagtgagggcagcttttagagtggataatctccttcgccatggtgcctgctatcgacaggtgtggaaacaacagatgcacggttttgtcacagattttgctcctgtgtgtccctcagaaaggcggttccccttcatttgttcttacctgttatggtccccaggatggccaggccctccttctgtcccccaccctgaagactctgcaactcacacacacagtcacacacatacacacacacacacacacacaaaacagtcactctctctctctctctaaacgtgccctaattcaggctaaagcccaccctttacaaatgcctcctccatgagctagtcaagcccatcaggttgtatcctagttaagatctcagaagcaaagaatctcggccttcaaaagaaacttagaggtcatttagttcaactgtccgggtgagggaggcatctttatgtgacttcattatattcaatattccctagttcctctggcttctcagtctctgcagtcaccccagctacagctgttatttccttcctattcccccttctccccatcctccctacctacccctactctcatggtttcctgccctcagcaggggttcttctcaccatccctctatttccctccttacccatctctgagtgatttttaaatcagtgcccactaaactcacatttatagtattataactttgagctgtagaacctaccagtactttatgtcctttactatccatccccatccccaacacacacacatactcacacatgagcacacacccccacacccactcattcatacacacattcacacagacacccatatacacacctccacagatattccacggagctacttgtggacagaattgaaggagactgtgcatgtaaatgtgttgaaaatctttaaggttctataatatgtcagggactattaacttgtaagtttctcaagggcaaggactgtcttctactcagaaaccatcaccccacatacacacagcctggaatattattagacacagagtaggtgctcactgaattgaaatctaatgtactgaaaattgctttaatataaacccattaaaaaaaaagcatcagtagccacaggcctctgacctcagggggagttgagggtgtagtgcagtaacttgtacagtcgctaagcatctaaacgcgtgttcggcaggtgctgccatacctgccttgcctgtttccctccccaaacgcagagaccctggaccttccttctgcagcccagagggcccttccacagccctggtgtgcgatgccaggagtctgcaagtgtctaggaagctcagtgggaaggatctgggaagaatgacctctagtaaacctgcagggagcactgggaagctccatttgcagcccctgactagaagttcatgtttcatcaattaatgctttcgataagtgtttgttgacatccacagagtagatataaactctaggctatcaacagaggagatttttaaaaatacagattcagggatgctatgccaaaagattctgactgaactgacctgaggcgggaagtttctggactctccaggtgattccagtgtgcagctgggaggaggaaagcactgctctacccactgcaaagcacgcctgcatggtcagatgaaagctgcacctcccctcaaggagccaggtgtctgcgggaagaacttgacaacgagattcaaagagaggacaggggctggggaggtcggtgggaggatggagaaggttctggaaggttgcttctgggaggcttctctccctgggcttctgaaggccagagtgcagggtgtggattagccatacccaaagccacattcacagagggggaagcatcactcctgcaggaaggaaaggaagtgagtcccctgcttgggaaatggtgcccaatctcagagggagaaagtggctcatctgctgttactttatataccttatattgctgatataatttataggatctaagacagcgtgaagagacctccagaaatctctgagacagcaccaaaggcaaccctacccagggaacccttggacttggtgaccttcaggctcagagcagcccatgtgtgtctcacttgcctcaagctctctggcccctgtgctcccaaggtctccagcttggctccaggaaaaggcagggcctcatgtcaagtagtacttttcttaaggagcttagaggtctattgacatttgaagcagctccatccctaaaaatccacacactgaagcccttcttgggagggaggtgacagggttaatctaagggctgggggaggcggagaaaggccttgaaaccacacagtgaagccaaccagattaatagaggaagagagaggggggtagaccattaggaagacaaagagaaaatcatgctggagcaatagaaagggaaatctaatatcaactagggaaaaataaatggagattagggcaaacaaattagctttaatgggttcaatgctaatacaagaataacagcggagctgcgaatgcctttgaggggaagatgggataaagaacctgagcagtcatgcaagcaataaagattatgcagggaagggggatggccaaaagagccagcagggagggagagagaagggaagactccgggcagatgggtaggggagcggtggcattggaggagtctgccatctttgacaggaaaggactgggacagagagctggtaagaactggggaggcagcaatcaggagggaaataaaagaaagcaaggaaactgggagacactgagggcagggatgcaaacccagagccggaaagactgggaagaaaggaggcagcgatggatgtaaacaaagagaatggaggacaaccagccagtacacaagagtaaagggaaataaaggaattaggtgccctctctgactggagaaaatttaaaaaggaaaaattaggccccaagaaaatgaaaagctggagaggacttggaagtgtgttttggaaagcacccatacttggtaggtgacgaaaggacatattcgctcttagggcggggtctggctattcctggaatacagtgctgctgccaggggtggcgccggaggtgggtgggcaaaagtaagcagtgcagagcattcactatggcatctgagagctctcagcttgagtctcagtaatgccactttgtaaaggtggagccttgaacctgttacatgccgaatctgttcctcatcttctcatcaataaaatgataatgtacttcatttctcaaagggttattataagaattaattgaaaagatgcatttaaaatactcagcttggcccaaaaataagcacctcccataatactggctatgattattattcttaggcattgactaatggggaagaggggctgggtactaaagatagctcttcctccctccttcccccacttcctcttcttttaggtccagcattggtgaaatacgagcctagtttgattctctcccagacagagtctaatccaagggaaacctctttatccatcctctatctccctcccctgtccctccccagctccctctcactattggggatgaaataataatgctaagccttccaccacagccaccctctgggctgatctaaggcagaagcatctaaggaagccaaatatcacattcgattggaagaccctcttatatctgcctgagcctcagagtgtagtagacaaggagctggcgttggtcctcatggcctcacatcttaggatcctcctgggatgcattaaagagcatagacaccccaccagggaaacagagccccaaagaccagcacacagcaacaataacaagctaggagtcaatcggtaacagcctagtcatgggcactagaaggggaaagaaggagctgggattatttcctacccctccaggcatcccagaaccctgcccttttatcattactaaggattttagaagagagagaagagaaatcaatccaggcaagaagaggggcagataggggtgggggatctttgccatttgctaataaataagttaattaacttgaaatcattacaaaaagaatcttcccataaaaccataacctccaagagggcagagacccatctttcttcatccccctatgtccccagaacctggaacagtgcctgttatggaaatggtgggtctcagtggtgagggtaatggctaacatttgtggacggtctactgaagcccaggtcctgtgtcaggtgctgcacgtgcaccatgttatttagatcacttggcacacttagaaggaaagacagaaagaagtgacagaaattcatgccaaagtaataagttagtcagaggtgaagcaggggtttctgactctcttctccatatagctttaaggaatggaaataaatgaatacatgaacctcacccactcatcagggcaagaggacagatttgaaagctacctctcagtttgggtgttattctatatatatatatacacacacacacacacacacacacatatatatatatatacacacacacatatatattccatatatggaatatgtatatatatatagaataatagaatatatgagggactgataaatgggccacccggcaagtagtagaagtttaaaggatagtggaaggactttcttcttgttgttgtatgtggctcttgtcagccaatacctcagcagcagtagttgaatcagattccagctctcagctctcccagagccagcctcacatgcccccagcaatagctgggatgagccagcccttcggagatccaatccccagctccacaggctcttcctctaaacatgtagctctgataactccagtttcttccctttgattcctccaggctgaggagcagtggttgcttcctgtagctactatctctgggctatttcagtgtttcctttgtgctcttacagccctccaacaccagacaacaattccccatattaaagcccctttgttgaaatacctaggaaggtttctgtcctctgaccaagccctggctgataccagaagagatctgaggaaaccagattttaagactggattgatcatgtccttggccttgaacacagtactgagctccttgacaatgagaactggagaactttttttttttttttttactgattgagccctggcaggcatatgcatgcagcactgcctacacagtcctgagtcagaaacttctcatggggtctctgagtctggaatgtctgagttctcagaaggggtagcatttgctgctaaccctctgcctccctagcttgagctgtctctcgtggttttttcccctgatggatgttaacatcttcccaacagagctatcaacccagtgagggaggagtctgtgtagatcacctcccatcattctccatagagtctctatggcccaggttagaagaaaaagacttcttggctcagactccaaagactagagtcagtgacagtttccttagtggtgtaaaatggcaagagtagcactaatctcacagaagactcctgcagaacacactgccacattcaaccataaagctgctctcaacagtgtgagcctggcaagcactcacgcatttaatgttgacgttgaagatctgatatgtgagccaacaggaagacctctgcattcataccctgactccttcagaagcagggcaaacctcttttttttttggactgtggaatctggaccgtcttctttaaataactcatttctgtgagtatatgtgtctgtggaaaacagaattctgtttaaggcaaagaaggtgtgggcttcactagacttgtagatctgcctccctcctcccctccctcctcccctccctcctccctccctcctcccctccctcctcccctccctcctccctccctcctcccctccctcctcccctccctcctcccctccctccttccctctctccttccctctattcctctgtccctccttccttctttttttcttccttccttctttccttccttccttccttcctccttccctctattcctctctccctccttccttcttttttccttccttccttctttctgtccttccttccttcctccttcccttccttccttccttcttcccttctttcctttgttctttcctttcaataaccaacaggcacttatattctgcttactgagactatgtcctggcttatttaaaagaaaggaccaaagagagcaggcagggaaagccagggaagactttctgtaggagggagcttcctgaaccgactcctaaggcatgaatggaaatcaatctggagaaggtgaggacgggcactccaggcatggaggacacagtcaaggacccaggagaggattcagatgcagcgaaagaatggcaagcaattctgtgttgttagggcatcaggttcaaggctcagacaggtaagaaatgaggcttgaacactaagtcagggtcaggtagtggtaggcattgtctacaagatttagtagcttggactttgccatgaagaaaatgatgccatgccttgcaaggattcttaaatatgggagtgatatggccagactaggatttagatgtgttgctcccgagctgggtagcaaaggttcacttgagcaaggttggatgtggagaccaatgagtccaggtgagtagttaactcctactcaccttccactcaggttacatgtcatttagagacatcttcctaatcagcttgagctcattctctcttgcacccccaccccattacaccctgttgtgttcttcttagcacttattccaagtagtaattacacatttatttctgtatttactttttaaatatatacccatccccagcctacctatccctagcctgaaagcttcatgaaggtagaaatcaattctatgtaatcagttctattaaaatgtttgccacatggtaggcatataaaatacatgtagaatggataaatgaatgcaggaatatttgaatgctggggacagacaggaaggtattggttaggtaaatatttaggaggtaaaacgtggtcttgtgagtattccatatgcagagaatggaaaaagataaaggctattagttgattcatgtgacatgtttactgaacacctaatataatttaataatgatcaaaacgaaagaagtcttcccctcatggagctttctatctggtgatagaagacagttatgattcatacatatatagttatgcaaaaaatgtaaaattaaaatttggacctaaagatgcaattaaatttatctatgatacctccccagtccccccaaaattcctcccttgactatgagactttttcttcccctcactttcaaccagattccaaacagcagttatatttgatgctacctttctatgacagccattcaagaaaggtaaagcatgttattagaacacccaaacagaagcctgaacctactctgcaggataaagcaaagccaccgaggaagtgactcagtgctgaaatataaaggatgagcaggagttaactagatacgacagggagacaagagctccaggaggagggaacagcatgtgcaagtgccccaaggctggggacacactgttacttccaaggttgtgcagaagaccgatgacagtgcggtgcagagagtgtggtggcaggtggcaggaggttgagtggaaggggcaggccctgagcttgcatgacagctggtattgttaccaaccaagacaacactagaggaggagcccccttatcacctaagaggaaatctccaatagaaattgaaaacaaaagttgggggaaggacctgactggggttacctgggatgcccatgatgccatcatgagatgggtagtaggtatgacaataagggtgtgtaggatcaccaaggatggccttgaagggggagagaaacactgagaactaagagaagcctgaagggagaaaacatatgtcatggagcaaataagggaacagaaccccattaaagcaaagcaaaaagcctagactgaaggtataaggaatcaggagatgggattgtcactaaaatctcttcaagagggagaacatggcaccctccaaccactcactgtccatccatggccactcatcaccaagcacatgctaagcaggaggcacagagcaggctgagcaccgaatgtgaagggaggaatgggctgcaagtatagctgctttttgagaaatttagttgaaaacaataggaaagaagagtatcatggtcaagggaagaattttttttgtttaatgtattttgaggtcagggggtggagaggcaacatagattaatttaattccatttgtacgtttaggggaaggacctggtataaaagaagaggtaagtaatgtttttaaatgggaggataattgacggagtaggattccagcacaggtagaagggcaagagatcaatgagaaacacaagccgcagctttgcctagctgctgtctttcggctacagtttcccttaggaagacaagtgtaaggcacagaggtaaccaagggtcatgcagcaagttgggggtaacagcagatgcaggatgctgctttccagcatgccagcctcttttacccagtccaagggtctcatgtgtccaggtaacccataacctcatgtgtgctggcatgatccagtgtgcagactttggacactgggattccatggccctgggacactttcttcaggagcagttggaggcacagaccctggcctttactccagaaaggcaccaagccaagaggattagctgggaggtggcacatggagatcacagacctgcaagtgagcagctggggaaggcaacaacaccaagctgagaatgccagggactgattcgcatggacaaggcctttcctttgtggaaggcgtataggcctggcatgatttgaaaggcacccaaagaggccactgcacctctcactatagccctgccaaggctcagctatcaccttgacactctatgggactaaagcaaaaagccccagatagttaagtggaaatttttgcagaacaccacattgagccattgccactttaggactgggcagagccgcaaaagataaagcaaaaggataaagaggaaagtactgaagcatgggatttgggggtcccaccatgcagaatcatgggaatccatgcaacaaccataaccaatgtaaaccatttttctatcacttgtatataagaaaacactaattacagtagacaaagacagggcccctgcctttgagtaactcataaagaaactcaaatagagaaagttactgttcaatgcagtcagtgctatgataggaatttgtgcaaaggactataggaacatggagaaaggatttccacatcttaagggtttggatattggtgcatataacaagaattttggtcaataagtgtctctgttttctttctgccatcccaactactcagagctctataaaggatgaagaaattaccaacaaagtcctaagacctccctgaatggtcacttttcaaaaggatatgtttctggacagcaagcttcacctagacctttgctgagctccaatccctttactgtacgataagtcctctctgaccccaggaaagcttgcatttcccgtctgagtacctttcactcaggaacctgcttgcatccggccaggcggtcttgtcttcctcccccatacccaccccacctccccactcacaatcctccagacatacaaagagtctttgcttatgaggcttcaaacctcttcctgggccacaccttcccccctcaccccacttcccgcccaaccaggaggctcctactcatttttggcttccggcctcaaagcccaccccacctgcagctgcatgaagaggtggtcagcacagtgggcgccaatcgtccccccaaccccagtgcaggaaggaagtctgcacccacctctgggcatttggtggtgactcacccagaagagtccactcccccacaccggacacaggaaagacaaaggtctttccattgcagagactcagcttaaaacttcaaaccataggggccatctccatctgcagccagcaggctctttccaaattctctttcctgcctgtcctacagccacactaaatgtctttcaatttcttgaaggcaccaagactttatgcatggatttctttccccctgaagaaaattcttcacctagttacctcctagatactcttccttgcagcttccctctaaccacttacgggtctccccaagcacctggacttatatccttcaagaaagataaccattaacatggtgattcctaatgtgtcttatcatatcccccaaaaggttcgaagttccttgaaggccaggattcttgtcttgttcaaggttgtattcccagtgctttgtacctgagtcatgataggcacttggtcaatgtcttgagttgaaaagaaatgaaaaccataatatacaaacaatcattattattgtcagaagaatgttggaggagtatgaagagttattctcttacgcttaatttaccagccatcacctggcctaaaccagtggttttcaaagtgtgaccctggcctagcagcattagcaccatgtggaaacttcttagaaacataaattcttagttcaatcccagacctactgattcagaaacttagggcattgtgctcagtactctgtattttaataaccctcactgccaagtgattctgatgcacactgaagtttgagaaaacactccctagtcctagtcctactcccaagattgggtcataacattcaaccatgggaatattacaaattagaaaaacgttacatttatagcaagatttgtttatctaaataaacacttctccatcctggtccccctatcttcttttttttttttttttttgagatggagtcttgctctgtcacccaggctggagtgcagtggtgtgatcttggctcactgcaagctctgccttgcgggttcatgccattctcctgcctcagcctcctgagtagctgggactacaggcgtctgccaccatgcccggctaatttttggtatttttagtagagacggggtttcaccatgttagccaggatggtctggatctcctgacctcgtgatccacccacctcggcctcccaaagtgctgggattacaggcgtgagccaccacacccagcccccctatcttcttataggggtttaagtcagcagcaggcataagttttgttaagctccattcgatagataaaaacactaaggttgaaaaaaaaacccactttctcaaatgataagactaaaacaggcagtgtcaaagaagggatcaggcccaagactctttccacagtaacacaaagtcattcagaagacagtcaaataaaataagcaccagagaattcaccgtttaggggccagaaatgtgaatgcatctttcccagcactacaatgcttgctgataacggtaaataacctctcaggtggcttcctgagggtttgggtttctaaggatgcgagtcagtccttcataataattaagagcaatgtcccacacaacttacagcgtcgttttctttttttaaaaaaaaggcacaatacccaattcatgccaccccagaatggcattttttttaaacctgcttcacatttgtagaggtgaagaacctccacctctaagaaaccttgctttcagatatagaggtcccagcctaaacacctaggtttgggtggatacggcccggaaacttctggaaaatgaggacaaagctggactgctgaaggtcttgtctgtgtttgggtggctgtctggcgcccccttgtgttcagtgcctggacccaaaagagccggaaggcaacaatgatgcagtgagggcaaatggctacagcaattcacaaatggcactctggccagtgaggaccagaggaatgggcttaggactgggcaaaggcccctctgcccaccatctgggctctcctgaaggccctccaagcactcttccagccctagtggagaagcagtcactaggaagacttgcctggacaggcataggtggaagctgtgcccaagctcacccgttgtgtccaccaggaagatgggtcattgcatccttcttgctgggtgtttggccagagggcttttcctcctgacttactgcccagggcagaggcttagagcacccccacctcccttttttttcttttttttgacggaatttcgctcttgttgcccaggctggagtgcaatgatgcgatctgggatcatcacaacctccacctcccaggttcaagcaattctcctgcctcagcctcccgagtagctgggattacaggcatgtgccaccatgcccagctagttttttttttttgtacttttagtagagatggggtttcaccatgttggtcaggctggtctcgaactcctgacctcaggtgatccgcccgcctcagcctcccaaagtgctgggattacagatgtcagccactgcacctggcccccaccccctttattaaagggaaattgagtgttctgctgaagacagcttgggcccctgaggagacattgcaaggcagttctgaatgtgctaagtcagtgggtgataatgggcactgtgtgcccagcaaaggcacttcccaccctcggccataaacagtctttaactggttcacacagaaggctggggttggctcttccttctcacctgcctgctccctgactcccacactgcagggctctaccttcccagtcatatcaccaaatcctgcccttggtgtgaaaaagaccatggcatgttcagcacaaaacagcagagccaatgacaagcatccaggcatagctctagccccagaacagggctcccctcaaggagcagccctgatctgagccttaaattctggatggatctcagctcctcctcatataagctgagttagacaagtcatataaatcagagcactaaaactctctgagccccagtctcctcatgagaaaaatggaaatctcggccctgaaattagcccagtatggctctaggtactatagagttgaatatgttggaaaatctaacagacaagtatcctcttgcctctgagtctttgcacattctgttcccactgcctggaacagttttctcccctctctccctcacttggctagtacctgtttatcttcagtctcagcttagacctcctcaggaacccttctgtgtttccttgagccaagtcaagttcccctccagtggttcccataactctctgcatgtcaccagtcccaaaagtggtcacaaaatatgttaactggctgtttgctggtctaggacctcactgtaataaaccccatgagggaagaatagggatcatgtctgccttattcaccttggcatcatcagggacctgtgcagtgcgtggcacatagttagcactcaatacaaatggatttgactggatagatgggctcagaatgaaacacaggctggggccagagagcagaggccaagtcaggaaagcagctaagggaacgtgtacacacatccatgacgtggatagattcccacagtggcctgtagcccctgtgtcagtcctggaacccagtgctatctatgcctgtgaggaccctgcaccaggtccctgctgctctggcctattagagaaagaaggaaccttgggggtcattcaggccagaagtccacagacagagctcaggccttctctgcccaagctctaccagagagtttctgcttttattcttttgtatttttttttctcaatgaggtagtgttttaaaatctggttccatgaggagaaggagaaaggtgaaaatcacctgtgccgtcattttacaaaaggaaaagagactctcagaagagaaggggttttccccaaggtcaaacggctcagtattggtatgggaagaccccacatcctcaattccttacacacttttcagagggagggaagaaaataggggattgtgatttggagtgaagggctgagtctgcctgaagagtccccaagcccaaggtgctcctgtgacaccatcccatcgtgggggatgagcatcacataccatttgtgccagcatcttgggagtgagaactggggaaggggtgcagaggggcccacagggcctggccgtgggatttcatggtcacagtcaaacacacacacacacaccagcacctgtactcatagctaatccccacccaaactcctacctgaccctgacagctgtccctgggaatattgtctccttaggccatggagggctgaaccagctgggaggggcctttgtgaatggcagacctctgccggaagtggtccgccagcgcatcgtagacctggcccaccagggtgtaaggccctgcgacatctctcgccagctccgcgtcagccatggctgcgtcagcaagatccttggcaggtaagcacgaaattcaccgcaggccgccttccccgcagggcttgacttctccagctgatctcagggcagctagagaattcccctcccagggaacggggatttgctcccaatgtccagctttggtcctgagacctgaacagttatggtggtccttctgggcctctacccagccactatttttctactgttttcttgcccttccttctttctttgtccatttatccttcttttagtttctccctctcccttcttctcttttgctccatgtctcattagctataggcttctctcctgctaaggcaagagaatcttcccccaaggtcctcctcctaccgagacctagggaaattaggccactagggaggggacacacagatgagctcccaaggtctaacccctaaaagagtgatatctgagtttgtgcttctcaaaccataattccccaagaccccagatcagtgcttcatagccctggtagcacattacagtcaccaggggaagcctgatttttaaatagcaatactgtttatgccccagggcagaccaattaaatccgaactttagggaaataggcgcaagttttggcatataactccccagcccatccgcccccagcaagtgactctaattctctgcagccagggttgagaaccactgacccaaagattcagaagagaccaggagcagcaaaggcctgcttctgagctgatgcagtcacagattccagtctgcaaagccacttccattaaaaatgcctctgtgccacagcttccagtcagctctgtgtacgtgtgcctgtccccctgctctgacccttaggtggatttaggaggagccctggttggacaaggtaaagggacctggactgttctttgaaccgtgaaaagccctggctcccctcctgaagtagttagggaaaggcatgatcctttgctgggctagggagaggggattcctgtgatgggttgtggtgtcccagaagagatgagtcctggatggaagtaacagatgaatggagttttaaagagctagattctttttcatgcagatgagagcagagagtttctacaacaagaagaggaggatatgctgacacaggcggttgatctgccaaagcaactagttggaggatagagggaggggaagggtggaggccccagaagaggaggctcagcttaacaagttggacctggctggggatccaagcaaggtcaggattccagagtccatgaggagaagcttcaacttgaacctgctaaaacctgatagaaaaccagtgaccaggggggtgagggatatgcctcaggcttggacagggcagggagcaaaggtgaaccagcaagacagagcagagggtccagtgacctcggctagctttctaggtggccaaagaaaatagtcagtcattggctgggcatggtggctgatgcctgtaatcccagcactttgggaggccaaggtgggcggatcacttgaggtcaggggctcaagaccagccaggccaactgagtgaaacctgtctctactaaaaatgcaaaaattagccgggtgtggtggcagacgcttgtaatcccagctactcgggaggctgaggcaggagaatcacctgaacctgggaggcagagtttgaagtgagccaagcttgtcccattgcattctagcctgggtgacagattgagaccctgtctcaaaaaacaaaaaaaaaaaacaaaaaaaacctcagtcgtgctttagccaaaagaagctggatagagcaaactgctgtgcccctgtcattcacacatcaggcacaccaagatttcctttcttagaagggaaatcttttgtgccccatacaatggctgttgcagatgctaggacacaagagactggccagagggaaggaagagagagaagccaaggtgaggcctttagcagagggtgctggtttggcagtagcatgaacctacccaagtgagggaaacagatagttccatgcacatcaagcgtttgagaccagccttggaggcacatttcactctcatacccctacccagaagcctcagagaggagggaggctctggctaaatccctgtctaaagaccccacctgcttattgggtaattctttgggattctctattggagtaggtactacgagactggcagcatccggcctggagtgatagggggctccaagcccaaggtggccacccccaaggtggtggagaagattggggactacaaacgccagaaccctaccatgtttgcctgggagatccgagaccggctcctggctgagggcgtctgtgacaatgacactgtgcccagtgtcagctccattaataggtaagagagaaagcagcctctggtgtcaggctggggcccctgggctttggggaaatcaggaaagagacaagaaaggcctggcttgggtggagcagaggccgggaaggggcctgatgctgaacaatcaggcagggagcacacctggctccaggcagatatcatacctccctgcctcctcccttgccccatgctatggggcaccctccccctggcccccagccatagtgtgctatctacagtttccttcctcaaacaccacatctgctttcattcaataaaagaatcttcatgaattgatccttttctaagccatcagacccctaacccagcccacattcaagcattcattcgtttagtccctcaatgattcactcactgcctcaatcaatcatttacttactcactcgcttgttcattaattcattcacacataattcactcattcattttgtgctaggccctgggacacacaaagcccatctttgcggagcttacagtctaatgagaacacagatattaatcaactacctacaaaaaatattgtaaaaatgcagctgtaagtcctgctaagaaaaggaacatgaagatatgcaaggtagcacaggattatttggtttatgaagttcatgaaagtcttcccttgagtaaaaaacaataagagaactaggtgaaaagagctcagacagttatgcaaaggccctgtggctaataggatcaaaagaaaaccagtagataggccaggtgcagtggctcatgcctgtaatcccagcactttgggaggccaaggcaggtggatcacctgagatcaggcgttcgagaccaacctggccaacatggtgaaaccccatctcttctaaaaatgcaaaaattaactgggtgtggtggcgagtgcctgtaatcctagctacttgggagactgaagcaggaaaaccacttgaacatgggaggcagaggttgcagtgagctgagatcacgccactggactccagcctgggcgacaagagcaagactctatctcaaaaaaaaaaagaaagaaagaaaagaaaaccagtagataaagagcaggggagcacaaggtaggctgaagttgaagatgtcagcagaggtgacctttcagaggctgggggctgtgttatatcttcttgcctttggtcataaagcaatgggaaacccttggcagattttaagccaacttgcatttcagaaagtccactctggctgcagtagggagaatcacttagaaagggccaagaggggatgggcgtgggccactgagtgaccctggaacactggtgatgacatgcactaaggtgctgatggagagacgcagagaggggtcaacgttggcaaggttcacaaggtcaaaacacagaacttgatgatgggtttgataggaaagagagggaagcagaggttaagccccatctctgttttggccttgagtgactgatggtaccaatcatgaaatgcggacaactgaggaggactaggcatgcggagtagggtcacagacttgactgtggacagttgagtttcaagtgccttggagatacccaaaaggggtgtcaaaaaggcgactgggtctggggcagccatgagttctctttcctcctcttctctctcatggcctttcttctcttcatcacagaatcatccggaccaaagtgcagcaaccattcaacctccctatggacagctgcgtggccaccaagtccctgagtcccggacacacgctgagtgagtgctgagagacctggatacacacacatgctcgtgtacacctccccttcagcatacccacatatacacagaggcacacacagacacacccacacagacatagctgtgcacagtaccattcacaaacccatgtgtagactgagttgtgccactgcgacgaagtctggcctgttcccagggcagattcactgaactatggagaggtgcaaacacttgagacagctctaactccaagaatccctcccaccaggaggccccctggaggaaggacctgagcccctccagggctcagtccatggttcggcttgctgcctcctgcacagtgtcagcagggactgtgaggggtgtcactctcactccctgaccctctccctcttcccaccaccgcagtccccccagagtcaccccagggctgtaaggggtgtcccaccccttgctcctctccctctcccccagcccctgcagtccccagctcaactgtaactaccccagagtcacccagggctgtgaggggtgtcactcccacccctgaccctctccctctcccccactgcagtccccagctcagctgtaactcccccggagtcaccccagtcggattccctgggctccacctactccatcaatgggctcctgggcatcgctcagcctggcagcgacaagaggaaaatggatgacagtgagtgctgggacaggagggcagcgggcggtgcacgagagcagtttgctcaggctttgatggggacagaaacccttccacttatgatatgggactttgtaggggctctgcatgtgactgtcacatgtcctgtccctcagttggccaaggctcctgggcccacgtggctggccctttttctccctccacagtgagtcagcttggagtcagtcctctactttggcctagagcatgaatagataggtcccctaaaagctttcttccttcccggggggtaccaggtgatcaggatagctgccgactaagcattgactcacagagcagcagcagcggaccccgaaagcaccttcgcacggatgccttcagccagcaccacctcgagccgctcgagtgcccatttgagcggcagcactacccagaggcctatgcctcccccagccacaccaaaggcgagcaggtgagaagctgggccctgggaggtgaacagggtgggcaagggccagagaaggtctattctccaaatgagcctgtgctccatcaaagcagctggaagttgcatcaatgggctcagggcacctgccttatgcaactccaagcctgacacatgctttattttaccagatgccctggcatcttcctccctttctaaccctcctggcttccttcacccaaaacctttgagcctgggcctttcagggatggcagcacaacctgatgatgctatcccttgccatcagcgtctttcccagattgcaacatcacgttccacaactctgaagcagtagcacaaagccttcacataatgacctcagccactatttcctagccccacctttggccactcatcctgcacaccccatgctcttgcattactcatggccccgagctcaccaccctcgctcacacctctctgcccttgcacactgtgtgccctccacacagaatgcctttcctcccacttctctgcatggaaaaataccactagccttcatgactcagccaaacatcaccctctccgtcagtcctcccctgcccctccgacatgaatcatctctcctgcctcttgcccttctgcatgtcccacatgctgctctcagtagcttctcacagtgtcacttaataatctagcagacagacaggtacaaagacacgcggactccttaaggacagggaagcctcatgaaacgttaaacatcgtttttattcccagcacctaccattgtgccccccttataatagacagtaatggtatagtgaatgaatgaacaaatgaatgagttgagaaatccagaataatacatcacaagctacagcgaatttttcttgctagtgctcaggacaggtgaaatgaatcataacaggttggtgtccgtgaaaagctgacagagatgtgagaggtcccaccctgaggccaacaaagactctgcagctctggcagaaccactaagctctcagctcctagtcatcacatctttttcccttaaccctgccaagtcaaccagatgaggagtgtcttcagggtgggtctgttgcccctctttgcccatgccgtcatttgctgtaggagtgaggcaagtccatatgcctttaagaaccgagtaggacaatggagatgatgccaataatcagcccaaccacttccagtgaccgtctgggctgctggtcccgtgccagcactcgcagctgggcaggcaatctgcatcagcaattttatcagcgttgactgtggcaaccacgagcgtgcagagaaagctgaccatcagcagcatggggagagggcctggggtgctcacgcaccagtcagcacacagctccaggaaggaaaggggttgcagtggggggcctgcaggaagctcactctgtgagagtaagcctgcaaaactcagtgtgcaggcaccagccactcagtgaaagtaaagaaaccctgctgatgagactctggacacccgctgagtcccagagccatttcctggctccatccctaagccccccaaaggaccctgcttgactacagagcacccccatgccatgctggcatatgaacatggggaatcctggaatgagaaagtctttgagctttcagggacctccatgaccaccttgtccagtttctccatttgtgtggagataatccaagcaagacaaggagggcttgggcaatcagaaggttttggagctcaggcctgccaaccctcatttcattcagactggtccactgtcacctgtttcagatatggtgcttctacgtaaacacttatttgaagactgaaaaaaaaagcatttgaaaaccattaaacttctccaaccactcatctttcagatgaggagactgaggtccagcagtgtccataaattattcattacctcctcagtcaatcattattcacccagtcattcacctggagggtggtgaaggcagggagaaccagccagtgcaagggcccctcatgtcctgcctggcctttgcttttcctacctctggtaactgactgtgctgccaaagtaacactccgtgctctctcacctgggcataggaatgccctctggcttggggagccaagaaagaagcacaagtattcatacctgaccttaggacaggttgtaacacagctatcttttctgcaaaatcaacaagtgggggaccaggcatggtggctcacacctgtagtcccagcactttgggaggccaaggtggatgggtcacctgaggtcaggagtttgagaccagcctggccaacaaggcaaaatcccatctctactaaaaatataaaaattagccaggcctggtggcgtgcacctgtaatcctagctactcgggaggctgagacaggagaatcgcttgaagctggggggcggaggttgcagtgacccgagattgtgccactgcactccagcctgggtgacagagcgaggctccatctgaaaaaaaaaaaaaaagggcagggggaagtgttcatcagaaacatcatgtggccttattcctggttgctatttcatgaccagacatagctagaagtcatacagctcttgtttccctattttacaaatgcatcaaaaaaaatcaacagaatatgaatatcagtttattgacagaaatcaagaatttggtggcttctgactcttcacgattctgaaataatatctgtgataactctcattgggcatctgctgtcaccaagtattcggtgctaagcacattatgtataagtatacaaaatttcatgtaatgcttacgtcagcctcataaagtagagtctatgattcccatacaggtgagaaaattaaggttcagagcagtcaagtagactaaagctacttggcaggtcattgcagaaccagggctcagagtcgctgaagttctgaagcattgtgctgctctgccccgattcaagttcaattccagctaaaaagcccaataatcactgggaagtttcagtcattgaatacaaaatcaccaaaagatttgactatataggttttctttttcctttttttctaagttacttggattttgaaatagctataggattctgagtagatattttgctgtcaaaacaacacatccataaagcattttaaacttctcttatacgctctagaaattaggtattttgttcaatttcaataagacacaccctggccaggtgcaacggctcatgcctgtaatcccaacactttgggaggtcaagccaggcagatcatgaggtcaggagtttaagactagcctggccaacatggtgaaactcctgtctctactaaagatacaaaaaattagcctggcatggtagcacgcacctgtaatccctgctactcgggaggctgaggcaggggaatcacttgaacccaggaagcagaggttgcagtaagcgaagatcgcaccattgcactccagcttgggcaacaagagcaaaactccgtctacaaaaaaaaaaaaaaaaaaaggccctaagcaactccaccctgcctctaagtgggcccccttggaaggcatggaaccagagcaccatttagtcaataattgctgctatgtgctaatggtgccctggtggcctccagaattgactgcagcttccaaaagtgcccagcatgcaaccggaaagtgctgtggatctttgcagaacccagctcgatggaaatcactgaaaacaattgcctttagtggcactgttatgtaactactgagcattccctgaattcagctttgcacatctcacgtagcaggtatgtgacgagtgtgaaggtatgtggggaatgggtgtgttcttttttctgcgctatctgcttccccagtggaaggaggccatggtgaggatgaggtacacttacctttagttaaacaagttcttttcggaaggagtacctaaggtcatagctgtgctcctgggaaggggaggccaggaggcatctaaaatgaggtcttactgatgaagacccccaggtacttgacaaagagtgtttccaacaaaaacaactctcaataccattttcaagccgaacttgcacacttctatttgtttggatgtggagagagaaaagaagaaatccacgtggtgggtaaagcacctgggtccacagccgaaaaatcccgggtttagtctgtttcactatacaaaattgggccatttacctgagttccaggctccacatataaaacacagacataatattactcacccatgtcactgggctgctgggggactctactaggacaacagaggcaaagctctgatataagctctttgcaaatgtaagaagtggtccttatgtcacccagtttagggcagtggttgagagcagacacattctgatccctcgaatctgaatcctatctttggcccatctggaagtgggacaagtttcttaaacctttgtgcctgggtttcctatctggggaagaataaattaacagatgcaaggaccctgaacagtccggttggagactgctccagtccttggcaccgtcctgcattctgtgggtcccaacagtgtggtgaaaccaggaagccgaccagccatccaaccagggtgtggtcctctggctgagactctctatcccacgtctgggcacccatgctaccagctggccttgaattccagggatgcgggaggacaatgagcatgaacgaaacgtgccgagtggagttgagaacgtaaaggaagaagggggcgatgaggacctctcctggggagatgagggctgccaagtcctaagacacaggctcagggtctgcaggaaggtcggcttgttggatcgtctctgtgcgctgacttctctttgctccccagggcctctacccgctgcccttgctcaacagcaccctggacgacgggaaggccaccctgaccccttccaacacgccactggggcgcaacctctcgactcaccagacctaccccgtggtggcaggtacaacgcccggagcctccctggcaggtggagggcgggggactgaagagcttggctggctgtcaggcggaaggtgtggggccctggcctggagaggagaggcgggctgtgccggccgggccgccaggtgggcccaggggtcgcgcctccggtcctaggccgggcctcaaggtgggccgaggggtcgcgcctccagtcctaggccgggcctcaaggtgggcccaggggtcgcgcctccggtcctaggccgggcctcaaggtgggccgaggggtcgcgcctccagtcctaggccgggcctcaaggtgggccgaggggtcgcgcctccggtcctaggccgggcctcaagctgggccgaggggtcgcgcctccggccctaggcggctcccgtaaggtgggccgaggggtcgcgcctccagtcctaggccgggcctcaaggtgggcccaggggtcgcgcctccggtcctaggccgggcctcaaggtgggccgaggggtcgcgcctccggtcctaggcggctcccgcaaggtgggccgaggggtcgcgcctccggtcctaggccgggcctcaagctgggccgaggggtcgcgcctccggtcctaggcggctcccgcaaggtgggccgaggggtcgcgcctccagtcctaggccgggcctcaaggtgggcccaggggtcgcgcctccggtcctaggccgggcctcaaggtgggccgaggggtcgcgcctccggtcctaggccgctcccgggtctccgcgctccctcctgtgggagaggcgggcgcacacacgccttccgggtctctccattttcgctgcagaagcgcagcagggaggtctagcttctctctccccgccttgccacgcctcgtgggccccggctctccccagcccagactctgagggcagctgagcctgccccgcgccccgcccgcaccctccacatcccacggcttggcttgtgcgtgttccctccccgccatctcacacccctctctccttgttgtctccctccctccggcagatcctcactcacccttcgccataaagcaggaaacccccgaggtgtccagttctagctccaccccttcctctttatctagctccgcctttttggatctgcagcaagtcggctccggggtcccgcccttcaatgcctttccccatgctgcctccgtgtacgggcagttcacgggccaggccctcctctcaggtacgacagggaggtcccggggccatgcagctatggcggcgggtgggacgggggtcctcagggcagaccgccagccccctctctggcctcagtctcatccacccccaccctgttccctaattcctccggcaacttttggaggcgccaacatgaagttctctgtgacggggaagacatgctcggaaggggcggatgctgtaggggtgccggggatgcaccaccccaagaccccatggaaaagcaggaaccctaaggccgggagccgggtgctgtaacgtagcaacttggccttggtaaatgcataaatagatagaaggaaaaatgaacattttggagggaaaaaggaattggcttttggagcccatttctggatcaaatttctaaaaaggccaagggtcagtcccagttgtgtttccatgatgcagctatcttcattcctagcttaacagcatcaccgggaggacagtcagacatctgttaaacatgataaattcagtgattcaacaacttgagaggagtgggggacctcccatcaggaacctcaactgcctcaaaatatttaaagctggaagcaccgaccgggcgaggtggctcacccctgtaattccagcagtttgggaggccgaggcaggtggatcacaaggtcaagagttcaagaccagcctggccaagatgatgaaaccccatctctactaaaattcaaaaaattagggggtgtggtggcagacacctgtaatcccagctactggggaggccgaggcaggagaatcgcttgaacccaggaggcataggttgcagtgagctgaggtggcgccatggcactccagcctgggtgacagagcaagactccatctcaaaaaagaaaaaaacaaataaataaaaataagtaaatctggaagcacctgagggagcctctagatcaaacctcttatgctgatgaggaacctggcccagggaggagaaggtccctgccaaggtctctgggcaggagcaccatctgtagctggttgaggcctgggcctgcactgcatgagtcagacctcaaggggagctggctcctcctggcagaaggaccttcgctcatccagccagggcctgaggaatggctgagagtcaagcgcttggcttgggttggagagggcctgagatgcagtgaaagtgggaagcagagacccatatggtcttcagatacctcaagggcttccacagggataggactattttagatgtgggcccagtgggggcccaggaccagggaaggaagccagctagctctcagttcagcattggaggaatctctttaatagcggcactgtctccaaggagtgtgggtatttagtgacagaagtaaatgcctcttcacctcccacaccctcctaccccgacgaccttgaaatgctggagcagagaccagtgcgtgggtggggtgtgtgagacctgtcacagaggcagcccagagtcagacagtccatctggaccagtggtttcaaatttgggcctctcaatgctctcttgaaatgaagccttttacagaagacatgtatgctcaccagacccctgaagaactgctcttttagaaggggtccctgcccctagaaagcccttggacttcgaaaccactgcaccagaggattaagacctctacaagcccagagtaaccacagggtcatgtgataaaagtccctggacccttttttttttgtttttttgttttttgagatggaatctcactctgttgcccaggttggagtgcagtggcgcgatctcagctcactgcaacctccacctcctgggttcaagtgattctcctgcctcagcctcccgagtagctagaactacaaatgggcgccactacacccggctaatttttgtattttcagtagagatggggtttcaccatgttagccagaatggtctcaatctcctgaccttggtccgcccaccttggcctcccaaagtgctggggttacaggtgtgagccactgcacccagcccatggacccttttttataactggctctacattttctttctggctggcacccgggtttttttttttttttcctccgtacatcccagcacctaatgtgagaagtttccttagaagagagggacatccagtgtgtgggcagagagatggtgtttaagggtctaaagcgaggagttgacttggagttcaagaattcaagagggtgaaggcagcagagatgggtcatttgttttgaccaaagtgatgaaaagagcaaaacctgtgagctgagtaaaattatgtcagccagagaaaatgggatgcggggtagggaggggaatgagaggatagtggagaggaagggaggggaagggaagggaggggaggggaggggaggggagggggtgaggagaagaggttcatgtcagttacagggagttacgcaagcctgcatgtcttctgagaatggcaggctagagctggcggcggtcatggggcaggcaaggggtgagggtgtggtggtgcccatgatgatggggagcaggtgctgtggaagccgcggagaagcttggcaagaccagctgaaggagagggaaggatgtagggcagctggaagtggatagatgtatcagagtgcagacataggctgtagtgtaaagtgcaactggaacagcccagggcaaactccctactcccaaagcccctacactttgtcccctccctgtcatcctgttagcatcccctgtcaacatgcagtcaatcagaggtgacgcctccaactactgtcagctgttaatttagtggacatgcccactctccaggccaactgcaggactgagaggtcacccaacccatgggacaaaacagctggcagcagacaccaggtagtcatgtaggaagcaggcagccaaatatgcagcaccggcatatctttcaggctggtggcccccaatccaggcccagatgatgctgaagtgcaggtgtgagcactttgaaggttgctggctggtcacagggccccctagcccaagggttgacaattcagcacagaggcagaggctctgaaaagagtgaggagtgctagccttggaggatctggggtccaggcaaatggccaagagtaggaagcaagtcagaaagcagctcaggcacaagggaggggatggctggtgtccatgctgagctcagggtgttggcctggagctccttacagactgtccacctgaggcctctggtcaagactggatctcaatacctaacacgtggctgagccatggtgagagagctgggaggacatgacggggggcggtggggaaggttaggaagggaatggttccaggagcgcaggaggctgcagaccttcccaagaagaggtgaatttgaaagaaagagaaggaacctgggcccaatggctcacacctgtaatcccagcactttgggaggccaaggtgggtggatcacctgaggtcgggagttcgagaccagcctgaccaacatggagaaaccccatctctactaaaaatacaaaattagccaggcgtggtggcacatgcctgtaatcccagctactcgggaggctgaggcaggagaattgcttaaacccaggaggcggaggttgcggtgagccgagatcgtgccattgcactccagcctgggcaacaagagcgaaactccatctcaaaaaagaaaaaaataataaagaaagagaaggaagttgaggccacattattcctaagtaatgctgcagaccaggagagaggagagaggacacagtgagttttcattccataatcagctcagctttaacccgcgtgaatcttccacatgcctctgagtgactcccaaggaccctcgctgccgcctcctgcaactccttcactacttcatagcgtttttctctgggtcacttatttccgcctggtggctctgatagtgtgatttccaaggtgactatccttctgagtctcagctcatccccagtcagccaagaaagaagaaacagcaaggtttggggaatagcaagagtgcccctaacattgctgccagttccctttggaagccccagtctggagtcccaacacactggccaagacagcaatgtcgaggccgtcctggtcccagctgctctgggactgcctccagctcagctcaaaggaaagccatgagttaggttttatcatcaaagagtccattcccctcctccatccttttgtacaaaattatatttagttctgccaaagagatttctgagttgccataaattctccttgctatcagaacgagataaggaattgaaaaggggttacatggagggcagacttcaaagggggaaaataaaatagtctgaaatcacctctaccctctgaattcctccaggcaatagctttatgattctggcctctaccaatatttagaatatttaccaatatttcaaggtgtagggggagctagagttttcttagagaactccacggccagtcaacatgggcctatgctttctgtcaacttcctaaaataggaccacgttggaaagaaatttgggtgtagaggagatggaattcatagcgaggatcgttttatgatgaagagtcttaaaaacagagaagtaggtaagagggcatggttaggccgtgatggagtttccaccccacagcttctgtggttttgtttctaagaaggcttgcaagcttcttggctttttggaagaaactatgcatttaagcaattggagcaaagagttttgtagggctgttgggagagtttattgtgccatagtctgggtgagagccatgctgaagaaagtcttaccagtctttccaggaagaccagctttcatggcaggaagcctcaggcgtctgttctgatgtccgattcagaagcctctaccccattgggaagacattaggtgactgaggggagatgaagattaaaaatcgtagagtacaggggagtgagactgatgaattccatttataagatcaatgtaggggctagttctcatgcggtggagccccgtgggggcacctctggaccatattaagctgtgttgtaaggggagtatatgccctggaactctgcctgctactctgccaggctcgagaggcagcaggttcaggtaatagaacgagaaggaacaggatgaaggcagggggaaggggagtgcggggccacaggctgccaggccagaagcagccctgcagggcacaaggccagcaccagcaaacaggtgacctgagagtcaagaccacctcccactgctccccaccccgatcatggcagacacaggctgcctcagaatccttctcaacactgggtgccaggaggtccctaccagccaatcaggtagtcaggtgaatccagtttacaagctgaaatctaaactagttccttatgtgacaggcaggaagacgtggttcagagaattaagtggctgtctttcatccagggtccagcctggatctggagttccctttctctctctctcatggaggaagaggtagggagggaagagaaaagaaggaagcaggcctgaatccgccaccaccttcttccatcactccctccctcaccacctgtccctgctctgtgctcctcctgctctcacagacttcctgtcactccttccctcttgcctagccggtgcttcatctgagggccaagggggctgagtttgagggtcgattgtgttgtattcttcttcaaagaaagctcagattttatctcagtatagcttctgcatatttctccctctgcgtctaaatatcttaaaattctcttttcccctcctgtgtttccagcccttcatttgttcccttgatgaccttgtgtcaggtaaactgaacacacctgtagaattctagtgggtttcaccccatttggtccagtgccaagcacagctggacactgcaggaaaagtcaaacaaattagaaggtggtgttcaggtttaccaaaacattcacacggttttaaacaatgaacactgatggctctttattctgtaggagttcactggcatataaccatttctagaatgtgtccattgtgctaatcaatgtccacctgtagcatgaaaccctggctctgaattatgcagataacctcatagaaattgtaataaggtgcctacagctatgtttttttttccattttgcatatgaagaaactgacccttggggcacatactaggcttatctaagggcactcagaaaactagccacagaagcagtataaggactccaggccctctgattcccaggccctgccctctagaggaagggaagaagttgtgtgtgcctggtttttgttcattgaccccttgggcttggctccaaatgcctatcccagcctatgtcccttcttgatttagtgcccggccttgctaatttagcatcctggctttctgctatatacccaagtgcttagaaaagtgtctagaatatagtatttactcagtaagtatttagtgaatgaacactgtctttggggaatctccagaaagagagataaggaggaggtagtcactgcagtattggcaacttacaggctttcatggggccttccttcccttctgtcatgaccaggcaccccttgaaggggctgaggtatgaaggacctgggggggactgatgggtggatagttggacaagcagtgccatagaggagatgaatttggtaagttggttaacagggctcacaggtggcccacacaggtcctgggaggaaaaagcagcccccaaaatggaagaggcagaaggcatttgggtaaaagagtcatagtccaacacaatggttcttagccagcagcgattttgcccttactacctcctgctgaggacatatggcaatgtctggaggcatttttgttgtcacactgggtgaaaactgctgctggtatctactggatggaggccagaaatgctgctaaacatcctacaatgcacaggacagcctcctgcagcaaagaattgtgcagcctaacatgccaatgttgctgagactgagaaactctgtaaatatcaccaagaactaggaagagcaaataactcattattccaactggagcattttgagaatgaaatgggcattattaacaaatatgctgggatactggtcatcacctgggtacaccttggcaaaccagggtgtattgtcaccttgccaagaatcttggggtgaaggagaatctgattggggcctgcaggacacaggagcaatagaagaggggcaggggcaagggatcatgtttatgttcattgttatatgcagtagatggggagatgctcgccaggtcaggtggggcctccaaaatgggaaagtgatttctcgatgtagaggagaagcagagccgggaaatgaggtctttacagagctgatttggtatcaccaaggtgggggtatgacccacaagctatagataaacagagagattggtgtctgttttgctaaaaatggttcttttcaaaatagaatggacagatatgtggcttgtggtcatgtaaaagctaaatatctccgccacatctccttctaggttggggttagccaatcggtttcctgtacctggcaactctgatagattgcatccacttggaaggccccctctactcagggggaaatggtatagtggttgattagcaatgtctgtcacaggccccccaaaaaatagtgatgagttagtggcccacatacatgccatcccttcatagggtcttattcttggtactcctcagagccgggaatgaaagggatgagctctgagttaagtggtctcaaatgtatttatggaggccagctatacccactgctctgctggctgctgttgggggtaacagaaaacagaagacataacctcagcctccaataccaggacattcttgtggattaataagataacaatcacgtaaacaaaaccactggagaacagggaacagtgtgagactgcagtaacaagtgctccctgcatggtggagcctctgtcctgcagaagaccagacagaggtgaaaagaacttgggctcagatgaggagtgggggcaggaggaagtgggtttggagaatggctgtagagagggtgggaatggcatggaggaagacagcctcaggagagtgagatgatacatatgggagcccccatggtccaactgacgactctttgctgtatttttccagggcgagagatggtggggcccacgctgcccggatacccaccccacatccccaccagcggacagggcagctatgcctcctctgccatcgcaggcatggtggcaggtaaggagagggccggcaggaaggggagcactgcaaagaggaagtattggagcaaggtgggacacaaggagcaagaggcatactgtgccctattcatagacttcccaaagggcattgaaggatggaccaaagagggcatctccttgtaaatgcctggagacgatgtcccagtgcagtcctgactccctatttaacttgccccagctcggcctccttcttcccaggcctgctacattaccctccatgatgaaaagggaggggctgagacaggtctgtgttcaaatccaagctccaccacttcttccagtgaatcagtgagcataaatggagagcactctaagggccccaaaacactgtgagtggaagatgaaccctaccctcaagcagtgctggtctcccagtgatttaactctgatgaatcccagtttacccgttctgtaaaatctgaatctgaagggtattgatgatgatgatgatgatgatgacgatgacgatgatgatgatgaaatatatgcttcacatctctctctcaagcctgcatggataggacccgggttctaggtactctaagagtactatagaggatgaaatgagcctggagtagctctccatcctcatttggactgttctggaacctgcctgccagtcatttgggtttctttgtctgccagtcatcatccaatgatgattcaagatgacaaggtctggacaaatgaagataatgggagtttccttgggcaagtctcaattttttaggagccatgtagggaagactttgggatggatgagacataattgagccattgtcactggtcaaaaaggcctgggacctggagtttctggaaagagctctgaacacaaggcatctgtgacccccatgccagccctaggccagcctctctggctgtgaccccagagacttggcgtatttacctaggcctgcttcccttccttgccggcaggagttaatctttgccagccacccactctgggcaccctatgcagaggcaggtgggctgggatctcctgggcagagggaagggagggagagaaagagggagggagaaatgctctgtgctccctgggaacctgctgagctggcacttgttgctgcctggttaccgtggcgatgtgcttaatgcagcgttgaaaatacagaatactgactcctctgtccctcctggccccggactccctccctccctcccttcctcttctggagcgtgaaatgagattggtcaagataaaaaaggaaaagattcggttatttttttaagagtgtggataatggggcctctcaatcaaaatcccagtctccagtcggttccccccattccccttccaacccctccaccttcccctgccgcctgcttagaggaggaggaagaaacataaagcacaaggcttttctcttaattatgaatcattccctgagggcaggcccagggcaaggggttcctggggcccagagtctgacctgtgaggtagctagaaggcttgagcctctcatcaaagtcccccaggttgtttccagaaagaatcctgagtgggttctgtgaaaaagaaaaaaaatagcacaactaggacactgactgcaagtgaaatccacaaaggagggaccttgccctacacagttgggctcccagtgagttccatgaaaatcagttttagaaaatgcaatactatttaaatgaatcacttggttcctaggaatggcactgtgcaaatgaattcttaaggaaatttttttgtggaaaaattctatgtccgtctcttaccactgcttgcaatctcccagttggttgaatggggactcctgcaattaaagtgaataaactttcatcgaacacctactgcattcatgttaggtacatgataaatgcttaaagcaaggcatgccaaagacattcatcaatcaattgtgaaaggaaggaagtgatcacttattatgtacttttgcatgtctagccattcaaatatgtataactttatttctaattttaccctgaccataagactaagaggctaatactatcccagttttatggataaggaaactgaagcaaaagcaaagtggtgtgctcagggtcataatcatactaagtggctgagttatgcaaacacggatttttcaatttcaagtctaaagctctttcctctacaccatactgcctcctaccataccagaaataaagacacaagctgcaagagaggagcacaggaaaagggctaggacagatttcccttgtctattcaccttctgtttctattttattttattttattttattttattttattttattttattttatattttattttattttatttttttattttattttattttattttattttttgttttgactccattaacagtcaatgattctcaaccagttctagagcagaaccagcagctccagacacatggatccatccagtcatctatctttccactcattcatcttcccatacatttttccacgcatccatgcattttcccatctatccttctatctttcatcatccatcccgtcatcctccacctttccaccgatccttccatctttccatccatctttccttttttttttttttttttggagacggagtcttgctctgttgcccaggctggagtgtagtggtgtgatcttagctcactgcaacctctgcctcccgggttcaagtgattctcctgcctcagcctccccactagctgtcactacagggacccaccaccacacctggctaatttttatatttttggtagagacggagtttcaccatgttggccaggctggtctcgaactcctggcctcaggcaatctgcccgccttggcctcccaaagtgttgggattacaggtgtgagtcactgtgcctggtccctccatccatcttttaattcatctgtcttttcagttatctatcatccatctttccatccatccatctttccatcaatccttttatttttccatccatattcattcgtccattcatcttttcatagaactatcctttaatctgtctttccatctatcctttcatcatccattcttccacccatccctcctctcctatatccatcttttcatccccttttcaatctattcctccattaatctatacatctttctatatatacatccttttatctgtccatctttccatccatcttttcacccatccatcctttcatcatcaatccttccatcattcacactttcattcatccttccatccttccatccatttaccactttttcacttaacaaatactggttgaaggtctactgtataggatgctggggatacagcagtgaataagtcagattcctttattcctggagcttataacctaatggtgaagacaaatggacaataaataagtcaatgaatgaacataataatttattgtctgtgaagacaataaaatgggatgatgtaataaagagccacagggagaggagataactactttagattgggctgtcaggggaggcctctctgagaaggtgttcaaagtgaccattcaagtgataaactggggcagaccatccctggaccaaagaacagcaagggcaaaggacctaaggcaggaactagtttagcatggtagcacaaaattgtagtggctgggtcgagttttaaaaggctactctgatttctaggaaaatgaattgtacatagtcaagagagaaagcacaaagaccagttaggggacagttgcagtagttcttgcaagagatgacagtggcttgagttagggaattagcagtgaaggagggaaaaagagaccctgaaaatatattttggttgcaaagccagcaaaccttgctggtagattggctgttgggatgagaaaatagaggaaacaagaatcatttgtaggtttggggcatggatgatggtggcaagtatatatatggcagaccaggaggggaagtgatgtagtagatggcaagtggaaatcaagagttttttgggccgtgttatgattgagatgcctactaaatgtccagttttaataagtcagcaggtacatcatgtgtgtctgaagccaggaaagaatcctgactagagtataaatttcagccattgcacaaagctgtcatttaatgacaagactactagaaaccaagcctggggttcttcaacaatttagagctctaacagagaaggaacagcaaggagaatgagtaggaaagacaactgagttacaaagcaaacagaagactgggcatcacaaacccaaaggcatgagacagggatgagctaaaaggtcaagggaattgaggatatagaagtgaccattggtatgatggagttagagactgtggggacttgaggggatcagagttggcctgataggaagggataagaaggtgaaggcagagaccatggggcagagaaaggcactggtagctagagaggaatgtggggataggaagaggattttttaaagacagaagatagcagaatatgtttgcagggtgaagggagagactgatgaaacagaaaacgggatcattggagcggccaaatccttggaaaggtgagtagggtgggatgcagagcaaagaggcagggttggcctttcatcggggcagagacgtttcatctgctgtgactgcaagcaggtaggcacatctgatgacgggaagatgccacacccaggtgtgtaccacctaccgagctccatcccctgccccaggttccatgtgactgaggtactcggtaaatggtagttaaatacataaataagtgggtgagtgagtgaatgcatgaatgagtgacaaaatgagagggtaaacacatcatgttttccacctctctcccttgtcctctagagctcactgtgtttgccattgggtagggtgtggtaaaaggtgagagggcccttgctgtgtggccagtagagaatcggctgaaacccgggagacctgagttaaacaggaggcagttggcactgggagatgcaagagagagtgccattgtggaaggacggggccagggttctagttctggctttcactgaatatgtgaccttggccaaatgtctttacttccctatgtcacagctgtgttatctgttaaacagatgtttagagtagattatttcttagtttttcatctgttaaatagatgtttcgattagattatttcttaggtttttttttctttgcttttttacttctttacccccttcctttttttacccatgttttttgcttgatttacgttagacttagtctctgcccctaaggaactttcttactgtgttctcagtccgtcattgacttcctagacaaggagaggatccagtagcctttctctgctttaggctgctcctcttcatctctcttcttcctgtataaatgcctacttgtctggcaataaagcagctcccactaaccccaacccaggccttaagactggttggatgactgatttaagcctccattgagctttattttcgcacctgtttaatgggaaaataataaaagcttagatttattgagcactccctgtatatttgaagcatggtgctaagcatttaatacatattttgtcatttaattctcattaaaccaaatgagatagggataattatttggcccattttacagataaggaaaccaaggttcacctgtaagtcactcactcagagaggctaagtgacttgtccaagtttacataaccaggaaatgggaagtaaggatttgactctagacaggtcagctccagagtcagggagtttcgagcaacccctccaaagagtctggggaaggagactcagaaccacatagctcccaatcgtaggtgagtttctgaaaggctgggtggacattcattgagtctcagggttggcaggaatctagctttgtaaatggaattatcgcataagtgaataaagggattatctgcaatttggagtcaagagccctaaggtcgagttctactctgacatttaacaacagtgtgatttgaggcaaactgcttaatcatgctgcactccagtttccttttctataaattggtagtatccatgagtacctcatggggtagtcttgagaataaaagatcataatgtatgggaaagtgctttacaaactttaagctctttaccaagcaccggtagtagctgtggtgatcagtttgactttgtttttgttatgtaagggaattcttaagtaatttcttcggtaaataattcctttggaaaactcaagaatccattaacagaaggaggtgatctgatttactttgtgtaaatttatacgttgagtttgcttaaagcggcagactcaggatggaacaacaaactactccaagtcccaggacacagcttcctgagggtgtgtgccctctggggctctccctcctctcccatccttaaccctcacacctcccctcagccccccatgcacacaaacacacacactcatacctagcgaggctaaaaggttcatatatatggatgtcctctttggcccctaaccccatacccctgctgtggggccctcccagaagagcccttctccagaaggtccaggcagcagaaggagcagttagtccctgggccctacactcacagcacagtttcccagctccaccaaaccctccagctctgggagcttccgcagatcccagaggctcagtttcttcatctggaaaatgggggtagttataacatctaccttctgggcctcctgggagggctgtagtatgtcaagccagtgcctccagtacctacggaaaaggacactgccccaaattttccagatcgatgggttccaaaagggatgacagagggaccttctgagctccattgtccctgccgtggctccaactgtctccccaaccattcctgagcttgcccattgccagccctgcagaccttcccacaccccagccctgcattgatgcccttcacctcacaggcctctcccctgtgtgcctccaacaggaagtgaatactctggcaatgcctatggccacaccccctactcctcctacagcgaggcctggcgcttccccaactccagcttgctgagtaagtccctggggctgcccaggcctctgctgggcaggatggatggagtggtggggggcaagggtgggtcaaaggttacctgaaagctgggagtcctcagattatacagagggcctgggagatggtgctgtttgtgatggaagaaggcagcaggagggcagtgtacctggttgtttggggaaagagggcagaagtccagaggcttccaggcattcgtttccctcctgcttctcaagcccatgtcttttaaatctttgttttgtgtaagattcagggctcaggccttgaaggggaggacaagggaggacttgagaaaagcctaagagaggacctcctgcctccacggcttacagtcccacagtgcagacactgacgcagggcacccgccagaatgtaactgccctccttcctgggagccagtttcaagaatgccatcctgttgcccccattaaccatctaagtggctcagaaatactcatgattcagcaccaaacccttaaacagaaatcttttgttccaccacattccccatatttagcctgagatgaagacagtattcagggtcgaggtccagagagtgagcttcagcgagcttccaggcttctcttcacccctctcttgtcctggggtcctgaactgggaagagaagcttttcagcaaagcaaaaccccaccaatggggggacttgagggatcccactagagcctccctgagtggtggccttgggtgtatcagagcaaaccggagccagacagaagcagtgatccaaggatggccaaccccacaggcaccattgcaggctaggaaccatccattccccaagaccccctctcctcccattacctctttgtattccagaaataacttgaaaggtggcagacctgggccctgtttgccagatgagttcaactccaacccagctttccattcaatttagccagaaaagacgagggcaatgagacatgccagggttcaggcaccttcccactgagcctccccaggctgcccatcctgcaggtgtgcagagcctcaccttaagggccgtcaagcccagatcccctttgacccctcagcagtctaatctccctgggtcttaagaaagaagactctctgtcctggcactgtttgggcaaggctagggaggatcccaatgacctctcagtgcacttgattctttggggttccacatgcaattgttttctattgccctctccctattgcaacgagggtgttgaaggtcaaagcagccatagggggaaggggcaagaagccactgttctcattctggccagaaactcaaaggtgaggccagagaaggaggaaatagggctggagaggagttaatcttcgatgatcagataggccagagaaatgaatgattaacttgtgttgtcttaaaggtcagcagatgcagggaaggctatggtgcaattttcctttctgaccagcagtgttgttgttatttttttttaatgtgtccaggttccccatattattacagttccacatcaaggccgagtgcaccgcccaccactgccacggcctttgaccatctgtagttgccatggggacagtgggagcgactgagcaacaggaggactcagcctgggacaggccccagagagtcacacaaaggaatctttatttattacatgaaaaataaccacaagtccagcattgcggcacactccctgtgtggttaatttaatgaaccatgaaagacaggatgaccttggacaaggccaaactgtcctccaagactccttaatgaggggcaggagtcccagggaaagagaaccatgccatgctgaaaaagacaaaattgaagaagaaatgtagcccccagccggtacccaccaaaggagagaagaagcaatagccgaggaacttggggggatggcgaatggttcctgcccgggcccaaggggtgcacagggcacctccatggctccattattaacacaactctagcaattatggaccataagcacttccctccagcccacaagtcacagcctggtgccgaggctctcctcaccagccacccagggagtcacctccctcagcctcccgcctgccccacacggaggctctggctgtcctctttctccactccatttgcttggctctttctacacctccctcttgggcatgggctgagggctggagcgagtccctcagaaattccaccaggctgtcagctgacctcttttgcctgctgctgtgaaggtatagcaccaccccaggtcctcctgcagtgcggcatccccttggcagctgccgtcagccaggccagccccagggagcttaaaacagacattccacagggcctgggcccctgggaggtgaggtgtggtgtgcggcttcacccagggcagaacaaggcagaatcgcaggaaacccgcttccccttcctgacagctcctgccaagccaaatgtgcttcctgcagctcacgcccaccagctactgaagggacccaaggcaccccctgaagccagcgatagagggtccctctctgctccccagcagctcctgcccccaaggcctgactgtatatactgtaaatgaaactttgtttgggtcaagcttccttctttctaacccccagactttggcctctgagtgaaatgtctctctttgccctgtggggcttctctccttgatgcttctttctttttttaaagacaacctgccattaccacatgactcaataaaccattgctcttcatctcaggctttggggttggctggggaaggaggcatcccggggctgggctttctcccaagaacatcagagctgagtagccgacaaactcactttggggccgtgggctggaagggaccatctgatgccccagagctctggcttggccttctccctctgcctttaattcacgttgaacgctgggtacctcactcatcccaagttcttcaacactgagcaaatgcaaggatagcacagtactgagccaaccatagactccccacaaggagttgctgttgttattaacaggaagccagagaatcagcagggtgggttagtgagggatccgggaatagctgtgactggagcctgcataaacagctctgaagggagagagaagactgggctctcttgtgtgccaggcacagtatggaaggcttcatataagttaagctgaaattagccctgttttacatacagcttcattttacatatgaggaaactgaggctttgaaaaaaatgagatgtcttgtccaagatgaaaagtagtagattcaaccaagtcctcttactctaagcccaacgcttttacccaaaaccccagagtcctcatcagggatgccaaatggttctagacccagtggaggttctggagctgccactggggatttaatttcttttgatttgctaaagatttgacctgactgaatggagaggtagagtgtagtgtggccaggacaaggtgagggaggctgtagagacttagcactttaggccaaccacctccaggaaatctgggaaatgcaatgtgacagctcgggctctgcactccagggggctgtctggtgtccacatggaccttctccatgtgggacacagctggaacaagggggcaggggcctgcagctgggatgcccaggtgaatatgggcagctggacaaacaacactgggattgagtcagatagaaggggcccaaggactccagggctgggaggacagaggctgggagagagggctcttacctccttaggcctcccaaagagcggttagggatgctgccatggatggcatggcagggggaaccctcctggaagaaaatccatctcttctgaagggatctgagatgcggctggtttttcaatggcagaacttccctctgcagcgcgactccgaatccatgacatctgagagtcttcctgaccacaaacctctgggatcccgagggctccctacccaagaatcactttgagcacagcatcccaaggagcccatagagcgatcccttgcattcacagccacagcccctctggggacactctgtacccccggcagaccctttccaactcacaaccaataaaggggcttgggctgtgctttgactaaggtga

SEQ ID NO: 76 - DNA, 59542 bp, Mus musculus strain C57BL/6J
agaacagctgtcagaaaggtagcccacttggtgacttggaatgggtggaaggattcctgcgatctgacttgtgctgttctaggctggatcacagggtcccagccaggggagggcattcctctttgctgagctgcttactctccatctctggcagggctatattcccaccatggggtctgacctcattctagccacaccctggcttccagaaaccttcttcctagtgggagaatggtaggtgctgggaagagggaggaaccaggttggaatgagcagaattgccatcacctaatacaaggccagggtcactacagattatttggtccagccagcagggtgcccttggccacaatagtgcctatagactcagttttctcattttcaaagcagattacaaaaaagttctagctcattgtttgtaattttaaaaactattgctagtcggggggtgggggggatgagtttcctctctagctcttgtataacttctttagtctttcttccttttctgcttccagttaggatttttcttattcagctccaggagcattgggctcccctcaagcagctaaggtagatgctgccaaggggctataaaatgggcaaaagaccaagggatgtgtgccaggtcacatctctaaccttccccaactggacaaatgccacaggtggctttttccaaactgccttttcagcccgtggcccctttcctctcatctgccaggacctgcatttctatttctgttttgaaagcctcagggaagtggaccagaataattaatgattgattcttaggcacagccaccaggaggccccagggcaggctgctggccatttccccaaaatgtgaggctagagaagaaattttaaggccatggcaggactgggcttgttcctgggggagatctgtgagaagatgcacatctactctctgcaaactaaagccatgaagtttgcagactgaacaagggccaggacgcaggccctctgtttcgctgggatctctgcttccttctttgtagtgattcccttcacagcagtccatcaccaacatctacacgcacaagtgcatgcttactggcctctttatcttgaggttctcacccaggaggtttttgaaaaactcatcatgctttgggggaaagatgaaaggaaccgatgtctactgaaaaatgctagaggagttttaactctgcccttcttgggtgtattgcctctgcctttgttgtctaataataattaacttttgtacctagctggttttcaaagggctttcacatttgtaagcctattcatcctcacaacaaagtgcaaggtaggcccaccctttctctctacttcactgcctctcgaatcccacagaagaggaaacaggttcagagaaggcatgctcccattttacacaatcaggtctggaacacgcactcacccaacacgagcagagagcagtcttgttcctaaagaatgcatcttggtgcaggaacgttcattaggtaggaggagataggttgttagcttggggaaccttatgccatgactgtcccccaggaagattgtgcaggcaaccttctgagccttcatagtaaaggggaagaggaggttcctggcctcctctgctgaggtatttggggcaccactaagagtatactggagaaagtacaaggggtacatcacctaagccagtgggcaccaggaccccacccttgtaatgagccacctaactccatgtacagctgaaaccctgggctacttacgaagaagtccaaaccactcagctctagtcaggtaatatgactaaatcaaccgcgtttgccaggacagccccagttttagtgctgaaaacctcacaaccaggagtcttcagaaagcccattccactactatcagagccataatgccaaaagaccatttttgaaagttccccagatcaatgtttgattacagccccagaatgttacgtaaaccaaaaagttaccaactgttgcataggactgtcacattcccctggaatgaatggaaggttaagcctaaaggaatctttgtttccacaaatactgaaatagtggccaaatttctcaaatttaaaaaattttaaagccaatcagcattgttcattatggcatttaaatactggtaacaaattaaattttcttggaaaaacagaatataaaacttgtaactgaagaagaaataggggaagaaaaaaaaaagcccagtgctagtggcacatgcctttaatcccagctttcaggaggcagaggcaggtagatctctgagttcaaagccagcctggtctacagagtgagttccaggacatccaggactatatagataaatcttgtcttaccccccaccccccacaaaacaaaacaaaacaccccaaaacaaataaaaaaaaacttgtaactggatttagactacaggttgctgattgataaccttgggggaaaagctttatgtgtgctaagctgaagaaaaggtgggggtagggtgggggtgggcagtattagtattttaataggcactctttaatttcttactgagtggaaagtcaatatgtaaatataattcgaaattttaactaaagtcaaagggagggttgattcttaaaagtttggagaacaggttttagtaaatcctgtctttcaaacttcttctttcctaaaagaggagactggccccagagatgctgcatttaggtacctgggtattgtttaatgacattcctgcttctgcctaggttgcagaaaaccaggaagtgcggaggaaccaggctctgatttctagttgtaattataaaacaaggcatggtgttcttactactggttggttctagaagatcaaccctgctcagtgtccttctggctatctatgtcacctgcagcctgaagcagggtgccctggaggcaagtgggccagttcttccttgataagcagctgcgtgcaggtgcacattacagtctcatactagaatattgtaataacttgctgttggtctaaatatggaagaaaataagacttttctgttggttagtaaaagcaagtattggttaaaataggtttattagctttagtggttattagacccttggcttaggtagaacttctgaggttttcaaaactgtgtagacaaggtatcttagacagctcatagggtctttaggtcctatcctgtgttctctgccacaaagaatcttctctccccaggaggatattatggtagagtcaggggatctggacctgccaaagtacagagcacccttaagtaacaatacggaagcatttaaaacaataacacactactagatgctttcgtttagagtcctttaatgatgtggaggatatttatacacattctcttttccacagaatgactacatttttcctaaattgagatacaagaagttgtgagttttcatacacagatgtgtgcatgcatctgcctgaccagctcagtgtcctctgcccctgtcctggcttcctcctcattccagctctttcttctacccctcaaggcagaacagtccctcctgcccaacagggctgtcctctcagctgtaatctgaaatccagagatctagtctgagattgcccgtggggaaagggggcatgcctcactggcctgtagattctccaggacatttgctcccacatactcacagtgtccccttgtacggtgattcggaatcaaagaggataactagaaagatagaagtggcagccagtgcttcctcttactccttcccaaagggtgccttctacatcacagaagccattgctccctgtatccttgccacaggtcagcccaaactacccttttctaaggcagaggatgaagtgaaatctaagcagtaaggcttcctttaaactcatcttccaaggtcctcactgcaaagaatgagaacaagaactgaattggtgcctgtgtgtgtttgagaagagagaaaagtccctatggccttagtagtagccaaccgctttccttaccctagtcctggctaagcctctatggcccaaagaaaatggtttggtgttaatctgctctagagagggtcacatcagcaagtaaagccatcttgctgcagcctcatgggcaaagacccacaccctcagaccaaagttctcactcagaaaagaaaaggtccctttcccatgagcaggggaagagaagggttgaaggttgtcatagagtgaccttgagctcactctggtggtcagcgatccaagagtttccagagaaccacatccccagaccccaggctttcatctcccactccccagtacttcctggcctgctgagttaggattctgtggccgccctctcttccctcctccagaaacagaagctccagcgaatgtttctaactcctgagtccactcagccatgtcccccttgcaaaatcccccccttccctcacccccctgcacccagccagccaatccgaggcctgagagcctcgccagacacatctcccagggcctcggcgggataaaactggctggcgatgccaggtggatgggagcaaacttcagaaggaagagacgcctgggccttgggcaccctcaggggcagacccaggcagaaagggcctgaggccagccggccaggtatgtcacctaggggctagaagggagctggaaacagctgggtaagaagactagcagcctttttcctctcaagttaagtgggatgaggtagtatctatggagggacagggctggagtttggggcttccttggtgcacccctaaccgtggatcctcccaacaggcacatttgctaggccaggctgaggttggcctcacttcaccccactctggacactcagtaggagtcaaaagacctggcttggggaggggatgtgggtttgaggcctcgattctcatgcccttcgccctgggtctatatgcagggtagctgcgtggcagccagagctgccaggacctgcgtaggaaagctgcgagtgtccctcagtctgtgagcgactccccggcgatgcctcacaactcgatcagatccggtaaggaccgcggaggggccaggacccccgagccctctcgccacccgtgcattgctgtgtgtgctgtgtgcgcttgggcgggtagggtgagaaaactctaagctggcaggacccacctgtgtggggacatagttgggggtgcctagggcctggatctccattgcctcgctgctctccagttcttgggtccccctctgttcgactctgctgtccttccccggccttggcttctgagaactacaggaagcagtgagggattatttgtggggtcacaagggctgtccttttgcacagtctattagggtgaacatcctgtacgctcacaggccttaggccaagtagattctagtcttgctgcgaccagagacccttgatctctgggtgctcctagttcttcccagggctcccctacggctccataaaccgccctccacctccattcatctctacgcaagggaaaaggagtctggggtctgtggatctggggatctgggatcggtggcgcactagattctttcctaccaggtttaagccaggcgggggcccaagatcagggcttccactagcacagactaatcgcgaaaagatccccattttccttcccacctgcgccccagctctgggccttcagagctcctgagcttcctgcagccgtgcccgatctgctcactcgcagcccgggccggggcgtacggagggaaggacttctagagtgcgagtgcggcggacgcccgccacaaagtcgcacggtcagggaggacagcgggcggaggcgcgcttcggcctgcggtgatggatggagccaggtcgggagcgaggaaagcgatttatggggccagggcgcatcgtgatcgatttgggccggccgagtgagaggaaatcaatatttcagatgaattctctgcaaatatgaagtcgcgcttagcaaacgggacatttgttataataaggagggtcggatcccgcgcgccgcttggctgagatctctatttagcctccagggtcggacagtgtggagcagtctccgtttggagggcccacaccgcactggaagggccaccgccaaccctcctacccccaggggcgcggaaaggtttcctaaccatttctctgtgaagaagtggtaaagcagtggggggttcagcaggatgttcactccccaggaaagtggaatcccagcggtcttagctgtcctggctgacttgggggcagcttcagggactgcgacgtggagaagtcccagctcttccctggtgccaccaatgaagctgcccggttctcctgttctgtcaggtccctagtgcgcccctttgccacgttctaagggcagggcaaaattacctttagtcaaactagcatatgcatcggccggccccgggagctgggaggttttccagcgaggtctataacttccctagctaggctccctccgcccctcaatccccccctgttactctgctttgacctcctcttgacgagagtggggactcacagaccttaaaatcatgagaatgagcgagactcttcttaaatgctgctaaagaaaaaaagagtgtcagaatttctcctgattggcttgttttcgttctaaaaacactcactagaataatcaaaaataaaagactaaaggcacaatgtacttatatccttaatcaacaactgccccagttgctgaaagaaaggcactttttcctaccagctcggatgagatcactcttggggttgagtggctcctcggctgtctcctgccctgccaggtaattttctgtctgaggaagctgaaggagcctcttctccctcctcctaacaaaagaagaaataaaaccgcaaaagagggactttctacatcaatacactgatttttaaaaggatgaaaatacctaaaggagtccctatagttcaaatctgtcccgcatttctctcctggtccctgtgttgagccggagatgctctttctatttatttgatgccctgtcccatatttagagaggaattcgtagctagcccctcttggctttttgtttgtttgtttgtttttgtcgttttgaaaacccattctttgggttcagagactggtccacaagtccgttgtcatcccaatttctgtagtgatgccacatggagtctgcgggtgtgaagttttctgtggcgcatacaccagagcgcaagcaacctctctttggttttcgccaaagccaggccgcctagtatcccctggtacagccatcccagccgcctcagcaaaagtttcctttgcactggggcctgggcggaggcagctcacccttcaccttccaaccttccactcatccccgggctaatctagtcttgtagaaaggtctcaacatctttacagctttattctcaagaatggttcgtgtttcagtgaattattttgacatctgtaggtcagcattgggctgagcggtctgtaaaccagcagaatttttttttttttttttttttttttttgttgcaccggggacaaacttctctaaaagcagaaatttaaaaaaaaaatattttaaaaagatgcgtgagaatttattggtgccacttaaatattaaaatgtaaataataatgtttctatgaccaagagagtgtggcaaaaagcaagcagattgtcattaatagaaacactgtaaaacctgcggagaacctgtccctccatacattctgaaaaacctgtcattctagcagcagatgagaagatcaaagaacgcatttgatttgcctgccatcaaacacctaaaaccgggcgcctcctgagaaagagggggaagttcagccggaaaagatctatttcttgccaggttccttgctcggctttgaggggatgaggaggagagtttcttgggaggagaactggtgtccagaaatataaagagttattggggttcctcaattcatctttgtttcaggacagtctatcttcccaccgtctgcaagttaatttggagataatttagttgccttgtgaattagttttaagataagtatcttttcaggcgttgtcactttaattgccccgctgattgataagaagtaattatttctaattgacacttttttgatgtctattggaagcatttatttgagacctttttaaaataaaaggaaagttaattaattttatcaatctatatccaaaaggactttgccattttttttctgaacagaacaaaggaaataaatgaaacaaaataaaaatcaataccatggaattttaattattaagaattattttggttcaaaggagatcatctaatactacagcaaatcaaaacattttatgacagccccaaatctccaacttcagcaagtgcatctatttagggcacacactttccataaatatattcattagcccgttctgcatctacttcatttgggtctggttccctctgctttgtagttgtgtgtttgctgttgttgttgttttgtcaaattaatgaaacttggaatgctctgaacagataaaatcagtttgttttctgttgttgttaagagccaatttaagtatgatttactatcagtcgttcttgctctctgtaattgttgatggagctgggtgtaaaggtgaaactttacttatggtgggtgacaatgctttcttatacctaaacctttggagtaaacagtttaatcattgaccatcagaatattttactgtgagagagaaagaggcaggaaaaaagaaaaggaaatgaaagtgaaaagaaaaggggatggggtggaggggaggagaaggggggatagtacagcagttacctgggaaagaagggggtggggggatagaagttccgcatttactcagaaaagaactggataagagcagaggggaggaggaggctagggaagaaggcatttgcttgggaaagaaggcagcccagttcggtgggggtctaggatctttgagttaaaaaaaaatggaaatcctaatttcagaacacattcttttgaacatgacatctccaccacagcccctgagcttaagatccccctttttctatgcttaaaaagaagcaaactctgggcagccaacctgttaggatactgggcatctagttatcaaagttttcatttgaaaaaaaaaatctatgaaaagaaatcagtaaaatatacactgttttctagggaaatacaaaaagattggatgctgtttttattttgttcttaaagctccatctgtttgcctacgagcacatctcatgggcacacttgtgacttattgacataagaagatattcctgaataaacccaacacactctttccctcccttcctcacacacacacacacacacacacacacacacacacacacacaccacacgcgcgcgtgcgcaaacacacatgcacacaaaattgtacacttcaggaagagaggaactgattataatcatgtaaaatatgctcatgtcaagttaacttcagccagtgtctttttcaataatttatattaaaaaaatcaaatcttgtctacttttaattctgtttctccaagattatgtctagctgcaagaatgaggaaatgtttcaaatgaaaatgaaatctacaacgttcaaacagcagataatatcacataccaaccctactattagtgaaactggaaaaatatataaataatgcaaaaaaatcagcaagggagagtttagtaatggaaaattcccgtgcaattaaatgaaacagtaatttagtggagatatgcttgaatggattagcatttattaattggctttcataaaaacaatgtgtgtgtgcgttcacacatgcccacacacaaggtagtgtagaaattatagattccctgcaggaaaagttgctcaaatgttcatatcaaattatgtccttatcacattttctcttttgtgtgtgtgaaaaatttctgttcttttgctggcaagtttcacctgcacatacagagcttgcagtacacagagcacatagagagcttgtagtaaggggaacgaagctgctcaccctctttttattagtacacttctaaacatgaaaccatgtgtagttgatttcactttgcttagggacataggaaccaggtctaaaaaggtgacctgcctgctggggtaggggtggggctgagggtgggatagctaaccaaggtagagaaggtcgctttgtggttttgggcctcacccaggctgcctgagcatcctccctggctctcaggcaggaacaataatttgtaatatcaaggagcttgccagtgttgactggtacaatgtttactttctttcaccagttgctctgtcttcattcagggctgagcattttaaagccactcagtccaaggagggctggagttctcagctgagctttgaggctttgagttttgagaatctgagaataagagagccaaaagaaagaacgaacacacacacacacacacacacacacacacacacacacacacacgttggggtagggagagagagagagagagagagagagagagagagagagagagagaaagagagaaagagagagagagttttaaaaggaggaagcagggaatgaatccccattcaaggctgaggaatattttgcccttagttgatacactggtctaagcttccccacctgagctctgagcgtctccttccttcagaggtagaacttcagggtctaaagcacgtaccccacataccacggatgtttctttctggagtcaggtggtagtgccttacttaacccaggttcctttgggagaagggagtctaaagcatacgaaactgttcaaaggctgtttctaaggcaatgctagatgggtcattttgaggtgaaaagtacaaagagcagctgggatctggaaagctgagccaatcccatcttactcagcccactagagcaatcctggaatggactacctgaagccaagcaggtgggaggaggctttaaacctttgggtttttaatctgcactaactttacagtacacctgtgaggagagacgattatttttttcatgtacacaagctagtaggccttcttgactttccaaaagcctttcagtccactcccatggcttcatagggagttgaaaagaaaatctttatcttaccggggtcagaaaacaaatttttttcatgtcaaggtgtttgggtaaactgtccattcatgtcactgagcaccagttttgcctggactgaagatcctgaaggatctgggtggaaaccagcaagaatctttgttccaagataatggtagagaagttcgggtgtccctcaggaactctcaggttaatttctaaggatcttactccatagtccccaatggcatgtaagatgccaagtatgtctaggcctgtctttgcctccctaaccctcccctgtccagcaatgctgcttttagggccaaagaagaaccagacccaagagccaagctcaccctggcacttcctgccaggaagctgagattctcatctctgagggctgttataggtgtggtattgtactgccagcaggcacatccatcacctcacttaactctccggacttggcctgactggcatgcatggatgtttctatagaagtggaaggaattcagccaaagaggcaaacctcaatcactccctttccaccctaaatggagctcatcagaactcagtagtactagatggatggttcacacttgcacacttgatagaaactcaaccagaaggctgagtaggaaggctgcagtgcctgtgcccgcaggcactgctagagccttcactctgtcagcttgttctcctgatccacatcccccagtctctagggattaaataaaatgtgtttgtctgcagcatggttgtatgtctctccatttgtgaagagaggccagtgttttatttctctgggcatctcttgagagttgctgtagggagaaggaggtatcaaacattagccaatacaaagggaggggccttttaaaacatttctccaaaactatcaccacacctccatccataccagaagaagtgccatcctttggcaccttagaaagttcaaagctcacaggaaagttaattcccttccttggcatctcaaaaccacatttagtctgagggcttgggtttatttcaggaataacaagcaagtgcatggaatagaaatagctttggtgtatccaggaaggcttccccattttgccaggggccagtactagctatccaatctcctggtcatgtaaaagccaggggtggtggaggtgctgggacgctgggtgcctgaacactgggctctagaatgctgggtgccaggcactttctccaagtttagtttttcttcctctgcagcttcctcagggtctgactctcaggggatcaaagccagacttcagctcctttgaagcctctacagaggttcccttataagtcagctcaaaatggggttcattttaaggtcctcatttagctgctgagctggctatgaaaaagcatagtgatggtttggcttaagcagagaaactgaaagaaagtatatcccccatttttagctcctaccctttctctctccctctctcctcctcccaccccctcttgctctttctgtcttcagccacaatgaagggttttctctttttcacttgtttttctaagtggccttggagtgacctggcagttagtgttaattactctgctgggacatattgtcactgtcagaataggacgggagactggtctggctgaatgatgcatctaagaaggaaatggcttaatctgctgtcatcctgtgaattgtgtgtttggacacacccaagcctctgtttgtgttgtaatttttatttttagtgtccctaacatctgaggaagaccagcagaactattatccctgggataagctcagggcctgagaggtgttaagagggtgagggacttccaaaatggctgtgaaaccagtgttatatcccagcatggaccaccaaagaccttgttctgcaagcaggagggggctaagccctggaagctttgttcttgacctggggctggttgttgttttctgtctgcgtgaccttagacaagtcagttgtctctttggggttgattattttatctgtatgaaactgtgggatactccagggtttctagaaaacagtgtatgtaaaactagtgtccaaatgaatatatatttatatattttcaaaagaaattattatcctcactatggcacttagtggctactcaagatctttctccttcctttctttctttctttctttctttctttctttctttctttctttctttctttctttctttctttctttctttctttctttctttcttccttccttcctccctccctccctccctccctccctccctccctccctccctccctccctctctctctctttctttccttctttccttctttccttctttccttctttccttctttctcttttactttatgtttttaagggacttaagtagcccaggtaacagaggatagcataaacttctctatctcttgcctctacttcctgaatgttaaaactgtaaccatgagccacgactactgaattataaggtgctggggatcaaacctgaggattcctgcatgccaggcaaacattctaaaactggaactgtatcattagccctagtttaaaaaacaacaacaacaaaaaacaaaacaaaacaaaacaaaaacaacaacaaaaactcttccatattatggtcaccaggggatggagtatccaggacacatttccagatatcctattgtctcagaagattatccagagctgaaactttgggttttttgggtagatttaggagagaccttttcatattgcaagtagacaaagctcatcccacagctgctgagataagtaaaagaaaacttgggaaatgtccactaaggtccccacagtcactgtgagctgttacactgtcttagttaaaaacctatttcacaacagaatctagtagtagcaggagcagtaagcttttaatagaatgaatgtggactttaggtcggaatccagagcattcaagggcagtggttctcaacctgtgggtcccaaccccttcagaaaacctctatctccaaaaatatttgcattacagttcatagcagtagaaaaattacagttacgaagtagcaacacaagtaattttatgattgggggtcacaccacaacatgagggactgtgttaaagggtcgcagcatgaggaaggtggagaacagctgctgtaggacttaatgaatctgccagagatctcttgtgggtttgcagttgcactgtgtatgcagctaagacaggacatgcaaacacttgccttagaaattcgtttttaaattcagatccataccacttagcttttaccaattaaaaatcgccggttttctgatttcttctcttctttccctctctccttctctctttgcctctgtcttctatttccctgctttgtgtactaataactcagtatcagcctgatggcaaagcctggttgacatttcagtcgtggtaactgagcactacttgcagacttcagctttgctccttcatcctaatgctgacttgattcttgagaagtctcaaaatggaggtggccattgtgggtgacctctccatactcacagactcatcttaacatgagtgtctgattttgattctgaggtagaagcaagggggagactgtaggcaagaaacaatgctagagtcaatctagaagcagctggaatctgagaggcagcagtttatttcagcttaactagcctacatgaagtgctgcctaccatattcagggctccacgccagggatgctaacacttgtggccagaacaaaaaaaaggtgagtggctgggcttccatcatgaagagttgagaggcaccaactcagggcaagaaagtagattcctgtgtatccttttaaagggaacagacccagagtaccagcactggcaatgagcagacaaaacagttcaggggcaggatgaagacaaacacagacagacaggtcatttgggagcaccaggaagctgaggtcatttgccttgaaccgctactagaaagaaacgacatcatcatggctgacatataaacctcctgtggccatctgtggtctggtggatcctagaagcattctgctccagagagatatcctgggattctggacaggaacagcaatctcccggagattcatctccatatggctggacaactcaaaatgaggcagaattataggtgtcagtatcatgaacagatgcgcatttctgcagagctgaaatgctaggctccatcagatgggaggggtcctctgcctgggaatacccgcggctcagcagcacatccgcgccagcccaggatgtactgttcagatttcatctctctagaagttgttctctgtatcatgcagtgtagacacaattgtctcagcctttcactgtttgcagactacttttttctgtttgtcgatctgccccacatagacagtatccaccttgagcccagagaacctaaggttcccgttggtagaggattaaaagggggtcttgaaaggctgcctttaggatcaggcacacccagctctgaagctcttctgactgtttatactgtgttcatggctgagttcaggagctgttgattttgtcagtggttgggacccactggtcctgcctcaaagcgttgatgttgtatgtgaagcacttgttgcctgtatctgaactattttcagcagacctaccatctcttgtaaagttttctacttttttcctcttcctcattttctcaagaaatcttactgctgtgattttatggctgtttgtagtctatttgcataggggtatttatctttatagctcctatactctaggcttgagctgtgtatgggtctgtcaggacactcaaacacaaacgccaagagcctcttagtatttaataccactaaatagtctaactgtcccggaagtgttaaggtcaagagagtcacagatgaggccctgtcatcacactgtgctgacaggagactgggcgtttgcacatctggatccaggtcctacagtcctgtgttagagcagggacgtcttcttaaaacccagagctttctcagtcactttgtggtacatcccaaagtgtggggagggtagattaagatgagagagagagacagggagagagagacagggagagagagagagagagagagagaaagagaaagagagagagagagatgtctgtggtcttttctgaatgtgcaggatttagaaaatggaagaaaaggcctccttcacaggctaaagtccaccgagagctgctgagacacacctagatgcacacacatcaacacacacacacacacacacacacacacacacacacacacacacacacacacgagtgcgcggctgaaactagagagaagtataaaggttcttgtgagctcatgcaagagcatggccagttctgagaatgagtgagtggcttcttaaattttgtagtctggacacctggccattttcagtttagttctctatctcatacatataccacatatactggcagatataagtttgcatacactaccttcttacacacataaacacactgggaataaaactttcaatgctttgaaattgccctagaactagaggtgataagtgggaaagagaaggccctctgttctcagagacttcgagagactcagatatgaaattacaggtgtgactggttatattctggttgaatccacagttgcaagaaagtgataacagacctagtggggatgtagactccaagctccctgggtctctgctccggattgtgagatcatttttgaatggggaaacagcccataccatcttggttttgtagtgtatggtttcagatctgaataagggaatatgctgtatccagccatgccctgtttccctgaccccaggaccttataaaattaaagaacatggatggtcatggaggttcagtagacattcttggattcagcattgttctcataagctgaggcacagggacaggtgatcatttgctggaggtcatggtggatcttccttgagctggatagttactagtggcaattttaaggacttattcctcccagagttcagccttttgtatcctgaggatgaggcattgagggcacattattcaggcaggacccactgctcagaagacactgccatccctaccattctgctttgctttagaattttggagcaattcttctccttggggcctttggcatctgtcccaaccccagtacacagctagctccaatcttccacaggtgtctattggccaaaacctgaagggaacagggagagttgacaaaacccatgaatatatgagaccatgcttgtttcaacacccacaagaatgctgtttatggttattgcaaacaatatggtttattcagtgaacaaatagttaccaacctcaaaagtctgtgattctcaaacaccattctcttgtaggtgagcagaggtgcacacccatacagcaaagcctgaagtgctagtaggaaatggcatttatagacaaaatgccttcaagtggttgctgtaagtttttctacctatgaccttctatgtctgctctttgggacccaggacctaggatctgattcgttagtcccattaaactcactgctccaaggtgtttgttgcagagcaatctgaccattctggcctaataatacatgtcagaaaggctggtattgctgcaaaggggcactgtctgatgtccacacagacattatgcttctctagctacatgaaataatgggactcacatgccttcctccatcaaagggcatctctcggatttgatttaacttttcctaattgtgcctcttctttccacatacatgatataattcatgtatgttcaacacttatggcacccagatgctttgaagcagtgtggtggctagtggagcagggcatcccattgctcagctttccaggcatgcacacactaaactatcattatatctgtccaagctgctgtggtctcattttctcatctcccttggtaaatacctgttttagcttcctttcccgtaactgtgataaaatatcctgatgaaagcaacttaaaggagaaagggtttgtttgcctcacattctattgtagggagatcaaggtggcaggtacttgatgcaagtcacatgacactcacaggcaagagcaaagagcgatgaacgcctgttactatgtagcctacattctctactcatacaatccagaatccaggcaatggtgccacttgtactgggtgggtgttccctcctcaattagtgtaatcaagatactggaatcctttcacaaacacaaggccactgtgttagacattccttattgaagctctcttcccaggtgattctgcattgtgtcaagttgacaaattcaaactgatcatcacaattcctgaagttaggacacctctccttgagatttcctctgaaggtcttgctatccctgaagataaccttctagaaacccatagatatggtttcttttgctaccctctgtaatgcacacatttctctggaaaggctcctagttccaaccctccattctcccatagtagcctcttactggctcatttctctgccagttcttataaaagcatctccatgcctcttcactctctaactctgactcctttccccttctgcattgttccctcagccacccatggcaagcttgcatccatcagcatcatctgttggttgcctttacctgatttttatattccctggctaagcaagtcctagtttttaattctaaattattttaagcaggattagcattaactggtcagttaaataagtaagtacttactaagcccttcagtgtggtgggcaatgaagttgggcttaatagcccttgctgggtcaggacaaagctatggggaacagcaacagcagcaggcctcatcctttccatgaagcattggggacagagagtctcagggccaccacaggcaatattcttaagcctggatacctctgccattatgctgacattccagaggcagaaaagcaaagtggactttcacctacagccaaagaaaggagaccttcagtcaaagcagaggcaaaatgctaagtaaggagggagggcggggctggggcttgtgggtgtagctaagcaaggagggagggcggggctggggcttgtgggtgtagctaagcaaggagggagggtagggctggggcttgtgggtgtagctgaggaagggctgaaggtgaagtctcactaggtagcccaagcagctgtgggggattctatgacgtgtgccctcctgaaggagctagcaatgggaagaggaaagagggatgaggtcctgcgaggctgtggggaacttaacaaagcctggctgagatagtccttctaggccgccttcatacaatctgcatacagagcttgtgcctgacctgttcgcagagcttcagtcctgcctgtttgacttcgtgattctgtgtttgccacttttcgtgtactttttcttctctcttgccagagtctgtcagactttgtgatgtttttattaagggaacagctatggcagtaagttttgatagctcaattattcacattatcaaaatgttttgatttctctcctctcctggccccattccagaaaaacttagcctggtgattttccaaaattatctcggattcctgtgtgggcttccttttaatccaatcactaacagttttctgtttaagtcaagtgcccggtgggttgaggactccccaacactgtttctgtacacaagcccaggtttcagcaaattagttactgtttacaaaacacacacgtgtacattctcacttggggacctttgcccatttggtgccagactctggtcaccatcccacctctcacaaccttgctcaagttccaccccttccaatgacactctctcagatacctgaaagctttagtgaccatcccatctagcttccctctcttcaggactcagcgccttcttttagctttttattatagtgtcctctctctgagatagataaaagttaaaatcccttcaaagcccagtgcattgtccagaatcctctgaggagtgagacccggtaggtaacatctgtgtgggtcacttccgcttacttccccaataacatattttattgtttgagtgactgactgaagtttttcagtgtgaagcatgcctgattctttccacatgatatgatgtaattacgtctcaattttctttattataaatgacaaccaggaccctgaagaaacaaggagtgtagccttctggagaacctgtggcagctaccaaagatggctctgccccaatggcatgcctcctcagtcctgggaatgtcaaatgctgggtaaccaggttggactacaaatccaactacaagttgcaaacatggtcagacatgggtagttctgacctagggatcagcctggtggacacaggctgcctggcaggatggctggttaaagacaagcacttctgtgaggatagaggatttctagattcttgcaagctaagactaaaagaagctaaccaaccaaccaaccaaaaaaaaaaaaaaaaaaaaccctccagctgatacccagcacagagatgtgtatcaattgctaacaagaatttttctagaagctgcaccctccttcttttccctcctcctcctcctctcccttccctcctcctctccttcctcctcctcccttttttcctcctcccacgtccttcccttcccttttcctccccttccctcctcttcttccttcttccttctcctcttcccgtctcctccctttctctcttcctcatcttcctttttccctcctcccttttctcaatctctttccttccattctcctcatctctgtgtcctgtggacacagtatggtcaggcatctcagacccctgccttcttcaccatgatggactatagcttctaactgagccaaaataaactcttcctctccttctctgtctcctctctttcttctcctcttcctccttctttgtcctcacagcaattgtgctcacagcgatgaaaaaataagtaatacaatcccaagtataatggcattgcatactgatagaaccattggagatggagcctaagggcagtaactagctcatatatgcccatccatgcttgtgttagaatagtgggttagtgtttcaagaatggcttgcttatatgatagcggttatagctggagactatttctatgagtttggcaacttctatatgtacactgacagggaccctgtctaatgcaaagcacaggaagggaggcatactggggctttgctgtgccctggtactcttctgtgaattaaagagatcccaccacaagaaggaaggattgagatgaagaacagagtgctggcctgacagggagatagcgttggcaggagatatgggtgtcatgtttaaaggagttttccatcaagagtcttgcttgaacctgccttgtactggagggccctttagagggaagccacaagacaggcaaacatctctgaagagtatatcacagagccttcccatctgctgtgtagctcaaaacccactaaagaggctggacaaatggctcagcagtggagagaactagcttctagaggacacagattccattcctaagacctgcatgatggctcacaaccttcttgtagcttcagttccaaggcaaatgacaacctcttctggactcagcaggcacaaggcacacacatggtgcacaggaataccttcaggcaaaatacatctataatcccagcactcaggatgctgagacaagaggagttcaaggctggcctgagtcacatagcaagacacacacatacctatacacacgaagacaaaacaagaacaaaacaattagctcctagtagtttgtgtactagttttctagggctttggtgacaaaatacacaggcaagatggcatagacatcatacatttctcagagttctagaggccagaaatttcagacctaggaagtcagagttacttcctagcttccagtgtgtgggcaatctatgccaccccttggctcatgcagtctccacgtggttttcctgtctacctattccttcatcctacatacttttgtctatatcatggatgtacgagattagggcccatcccagtgacctcatttcaacctcattatctacaaagatcttgtttccaaataaagccacactctgaaacattgagggttaggacctcagcatatgagtttgataagtgggacacatttcaactcttaacaatataatcacgatgtgtgggcttgcttgctcagcaccccttctctaacctcagcttcacctgtagctaagtagagtccttgtgacaccaagcacaggaatccaggtttgagactgatggagtagggtaaattaatgcctgttgtctaaaatcttttctgttccactagagtggaagggatttcatccttgatgcccagcacagaacttcttatgagggtacagatttaaactaaaaaagatggaaatggcaatcaaacaagctgattagagaagatgcagtctttcagggcactccttggttctgagtacattctacccaaactctagtctctctctctcttctctattgaaacagcaccaatgatcccaaagggcttccagcaatagaaaatgaacaagtcagaaaacatcagttctgtcctggctctgcaagaaagagtgtggacatcaggtcatctcttctttgctgccagctacactctgagtgtcctgcacagacacatatccccttccacagagtgatggtcacagtagcctactccatcgccatggaagctacacaggagctcttgtagtcctcgatgtaccattttcatcttacagcaacctcagaatcactgtggtggtgtgctatggagggggttcaacctttttattcttctggggagccttctgccctcaggcctagagcctaaggatagccctggagtaccacacccataggatcatgtgctctgcagaaactgaggctcagatacgtgtgctcacgggtcctgcaggcaacttcatgcttcttcatttccagcactctgggtttcttcctctgaaaccccagcctggaggttgtttctgttcctctttgtttcctcccactttcttctgcagccttgagagtcaggccttagagcaaagaattcccttcagaatggtgccaggttgtggaaaccacagatgggaattttcgttgaagattttgctgggtgtgccatacttagaaagatggatcttcatgtgttcctccctgtgcagcacagagtgaccacacctcctatgtcctgccttgaggatccaattccaatcttcttttccctccctttccctctctccccctccccctctccctctctctcccacccccctccccctctccctttccttctctctctccctcttccccttctgccccccccacatatacatagtttctaattgtgtctctgattcttactctagccaaagcataccctctcctgctctctaagcttgtcaatcatatcttaccttagttaagatccaaacaacaaagaaacctagagctgcagagaaagagcggtggtttagttagggaagcgtatctttttcctactttgtgattgcattctattaaagactccactcacccggcctctgagtcactgaagttacaccaactacagttgtttgtccccccacctcctgctgtcctctccctctcctctcatgactttgtctgtctctactggaggttcttctagccacatctctatttcccttattacccatcttaaagtaatttttaaatgagtgttcattaaactcagatataaaaccttgtagcagagctacagaacctagtgctccagcaggacatggtgactgaacttggattgtttactatgcactagccccaaacagaggcacgcacacacacacacacacacacacacacacacacacacacacacacacacacacacggatatcctacagaacttcttggaggaagaaaggtgaatcataacccacagtgactggatcaaaaagccttaaggtttggtaacatagtaaaagttattaattgtgtgtgcttctcaaggcaaatcctagcatctcttcagaagccacctcgtcatgttacatgtctcccagaattgaatattgttttactatcaacccattttcttaaaaagcagcattaataacctctgatcctaggggaaatgtggggtgacttgggagggaactagaagtcaaaatgtatacttagcagatatattcacttgcaggaagacagagctctgactcctggtgtggatatttctactaccctcaggcagttttgtagcaggaatctgccggcctctggaagctcagggggaggagccagaagaaagacctctagcatactttccaggacctggggaggcttctctaacataccttccaggacccgggagtcgcaagtttatgtttaatcagctaattaatagtttgggttcatagttatttctattttacagagtggctataaagtctaagaaatcaccagaagatctttttaaggatccaggagcaggggcattatgctgaaatcttttctttaagctgtacaaagtgaaaagtgccaggcttctcaagggagtctagtgagcatttaggtaggaagtactctgctctccagaaaggagcttacacagtcagaagaagagttacagctgcctctgaggtctcggtatccaggaagaaatctacatcatgagagtcaggcagaggcctctggacaggcaaggctggcgagaaagagaaagtttctgaaccttgctcctggtaggcctctttccttaggtttatggaagccagggtgcagggtgtacaccagtcacactcagagcccagccacagagggcctttacatgggaaaaacgagggcatggtagctttcaggttcaacacagctcatgtgacccaggtgtttgcagcactctggtctctgtaggttttggaaacctactgactggctttaggaaataacccgatgttaagatcaccagtaccttcccccagacatttagaggcttattgacatttacagcagcttcatccttgaaaatacagacattggggtccctttttgggagggaggtgacagggttaatctaagggctgagggaggcagagagaaaaggccttgaaacaacagtgaagccaaccagattaatagaggaagagagaggggggtacaccattaggaagacaaagagaaaatcatgctggagcaatagaaagggaaatctaatatcaaccagggaaaaataaatggagattagggcaaacaaattagctttaatgggttcactgctaatacaaggataacagcagagctgtgaatgcctttgagggaagatgggatacagaacctgggcagtcatgcaggcagtagagattatgcagggggtggccaaaggggccaggggagggggagagaggggagacagagctgaggaagcacaagggaaagggggcctagaagggcctgctgtctttgataggaaggggctggggcactagtgacagtagggtcagaggaataattaacactgggtagaaataagggaaaacggctgaaggagacagaggacagggggacctacagctcgacaggcagaaggaaagaagtacaagcagacttaagaacggaggaaaacaaaccaatatggaagagtcggggacagaaaagaattgcattttttttctcactaaaaagaaaatcaaatagtgaagacatagatagacactgatctatgggaaacctggggataattttagattgggtttgggagccgcatacacttggtaggtggtgttgaaggcatggtcactcttagatagggtccgactaaatgtgggatgaccatcttactgccaggggtggcagaggtcacaaagtgcggagtatttgtgtaggtgttgcatgtagagactccagcttgagggtcagtttgagccctgctgtaatgtgcagccttgggcgaattccttacaatctctgctccccaccctgctgtatataaaatggaggtgctgtgctttctacctcaagggctgtgaagccaatttaatgaaaagatgcgcttctgcttggctcaggaagaagcatgtttcttgatgttgcttgcagccataattcctaagcagtaactaactcaggaaagggggtggatacagagcacaacccacctcccttcttccttctctttcccccttttaaaggccaatattggtaaaacacaggtcacctttgattcatgttcagttattacccttttatccaccattagtctcctgcatctgcatttatgtcaccccccctccataccagagatgaaatgatagtactaacccttctcagccacaccaccctctgggctaatctcagccagggcatcttcccctgcttctaggcgaagccttctactcctataaggagataatatttgatctggctgagtttcagaccatagaagatccagaattgctgttggttctcccaactgccttaacgtttatggagaagcagagcaggccagatcagaggaaggcatccaaaagaattcccaggagtcaatgagtaaccacccagtcatgcaattcaggaggaaaaggagcactgtggttattcttgacccccacggcatccagaaccaagcttctctcatcacgaaggattgtaaaatactaacatcagaaaacagcccgggcaggaggcccagagttgtagagggatttgctacttgctgagatgtgaaaaatgaaattggaaccatttcaggaagaaccatccatgaatccataaccccaaaaggatggatatcaagatggatacagaaatggtaaacctcagcagagggcctacggagcccaggttccatgctaagttcataggtgtctcatatcaaaacaacatacctacacagagggaagtgaaggtcataacttagaggtcaagtacaagttttctggcctccaccctatacagcttcagagaatgaggttcatatattcattaatatatgaatcactgccaaaacacatgagatgaagctgcttctacagtggagtgtctatggtgaactactaaatggagaagtcaggtcaggaacatttttacttgttggtactaaagaagttttggtttttgaaaaatcttcatattttggaaatttgggttagcgatgaccaacccagatctcagtgactctcaaattcttcctttgtgcttttatattctttgacacccaggaaattttgtttaaatccagctgctgaaattcctaggaacaggtttacatcttttgaccacactccaagtgatgctaccggaagaactccaaggaaacaaggttctaagattcggatcgatttagtcatggtacttgaaggtagtattgcgcttctaggcagtgagttgcaggaagcagtctcatttctttttactgaatgaactatgaaagacacaatgtggcactgcccacatagtcatgggtcaaaaacttcttctcaagctggtgtctgagctctcaggaaaggcaacttctactactaatcctatctccctagcttgagctgggactcacaggtcttctccccaatagaactgcaagcttcccaaggccagagctgtgtagtcactccaacattcttcatgaaaactttgtgaccagagttagcagtaaaaggtttcatagctaggaattttaacacccacactgatgacaatttcctcattggtggaaaactgtaacaataaaacagcacttctttctccataagttcctcaaaacatgtagccacattcatgcataaagctggctcctcacagaggtatgaagcccaggagggctcatccacttaatgtgaccatctgaggcttgggtacgcaccagcagaaaggccactgcatccattctgtgtgtccttcagaagcaatgcaaacctcttttttcctgggctgttatatgtggacctccttctttaaatacttacatctaagaatgggggaaatagaattctcttgaaggcaaaatatatgtagcttcctctcaacttcctcgggccttctttcctccatatttgtctttgaacttcctgccttccctcactttttcttttccctccttccatttacattccttctttccttccaatttagtgtcacagtgttccaagcactactttggatgctagggtttcagtaaatcacaacaacaacaacaacaacaacaacaacaacagcagcagcaacaaacaaacaaacaacaacaacaacaacaacaactgttaaacccagtttcttgaggggttcctcaagaaacagtttatccatctcaatagttggacacttatagtctgataaatgtggtagtagagcctgggcattgacttctttaggtgaaagaaccagagggagcaggcaagaaaaaaaaaattggaggacttcctgtaagaggctaactcttaagatataaatgaaatgaaaataaagtaatggtactccaagcataggtgaggacccacctatgcctggagtacttaggcactttgacaaaaatggtactaaagtagtgattttaagacacagatggtagaaatgagtcaagagagaaaggtcatggtgggtcttgtctgctaaatttagatgcttggacttaccatgaatgaaaggatgccatgtctttctttaaacgttatttaccatgggagcgttacatccagacaggtttggatgcacttatttccagctgcaaaacaaagagttacatgggggaaggttacatggggcaggggtgaggcgctcagtgagttcagggaaccactcctacctgtctagattctgttacctctgggggtttcctcttgtccttctttaaatgattctacttctcttgtcccccatcagtactctaattccacatccattgtctccttgtagagatgttaactattaggcgttcatttgagtgttgatttgccgaatgtgtaactcctcctagactgtcactggaataaaagctccagggaggtaaagatcagatttgtgtactcacttctgctaaagtatttggtatgtcatagtgcatcagaaaatgttgagtgcatgggttttttaaatgctgaagacagttagaagatattggtatgaacatttagagatagaaatgatgtatggtctgctgaatataggagaatggaagatgctagaaatggttggctaattcatatgggatatatttatttaacgtgttacataatttaaccgaaagtgaacaaatatttttgacctcacatggcttcaatctgataacagacaaaaccccagacacccttctccgcattcatattttttcctgactatgaaaatttcccttcttattttcaaacaagtttctcaaaaacagccatacttgttgctagggagagcatagatgaattttatttctttttataccccgagtgtgggcctagtagaaagtgagtggtaaaaattgatttttgaaataggacaacaagttatatagtgagtttcaagaacattctaaacatgagcagtatacaagaagtgaatgagaaaggtaaacagtcgctttcaaaggtaaagatagaccctgtctcttctggagcttcccttagtaggacaagtggtccgcacaagacaccaaagatcatgcagagaggttgggggcggtggcgggagggggaggcagagtggatccatgatgcagctctccagagggacatctcaggatgtgatgagctcacagattgaagtgactgctctactgacatgagacagtggtagtccatggtcccagcacactttctttaggcacagtttgagacaagcttggatttttattttataaaggtataaagtcaagatggagatgttgcaaggttgtgggtattgcagacgtgaaagccagtgtcctagggaagggcaacactagagtgagagccccaagacattagcattagcaagacttactctttacagaagaggggagttagcatgatttgaagggtacctcaaggcagtcactgcacatctaactataccttgccaagggttgcccactcttggagcaaaaacaaaaaacaaaaatccacagatagtaaaatttagttttgttttgtttttacagcacagcatggcacactgagcaattgttatttggggctgagctttaggaatcaagaagatgagaaaagaaaaagaagtactgtggaatgggatgtgagggtcccacagtagggactctgagttgggtgctaagacttgacctcttccctcgaggaatccataaaggggaccaaatagataatgttgttggttaaagtcattgacatgatagtgctacagaagatcgtggggtagcaggaaaggtgtgcttctgtcttaagtgtttgtgtgatgagagttttaagtgatgtctctgtctcattctttcatccttacttctcagaaagttctgagtggagaagaaattaccaaacaatatctttgggtctcccacagtggtcattttccccaaaggatgcttctagacagcaaacatcacctaaagctttacagacctgcaaattcatttaacttaccctaagtcctccctgccctgtaaaacttgtgtttccccatctgaagagtcatactcaagaacttccttttatccggccaggattcctcttacatcaccacctgtctccacccacagctctctagacaaggtcttttgagacctttgcttatgaagcttcaaacgtcttcctgatttacattttccccaaccctacctctggaccaagtatagagctcctactgatcactggcttccggccttaaggcccacctgcccataaagtacaaagcagcacggagacagtgggcatcagtcccttgcagagggcaggaaggaagcctgcacccacctctgggcatttggtggtgaatcacctagagaagtccactcccccacaccggacacagaaactcaaaagcccttccatcacagaactcagttcagcccatagaggccattctcataagcagccatttggcctttcccaacctttcatacataatctatagaggcagtaaataacattcaacttggtcaagactttatgcaaggaattttttacttcctacagctatttactttctttctttctttctttctttctttctttctttctttctttctttctttcttttttgtatgactttctttctttctctctctctctctctttctttctttctctctctctctctctctctctctctctctctctctctctctctctctctctctctctccctccctccctccctccctccctccctctctctccctctctccctccattccagtcattcctttgatttctctttgactgtctgtatgcttctccaagcgacttctaccttgacatgaagattttcaattaatctggctgtgtctcccgaaaaggatttaaacatttatttcttgttccaggttacgtacccaatgctttgtgcttgagtcactattagcgttttgttcatatgtgtggaatcgaaatgaaagtcattaaatgcacatgataattataactcttgaaaaatgattggagaaagaaagaatatcatcttgtgtgtttgttttggcaaccattgctcaacacccagcctaaaccagtggttccaaagtcatacaatctagaagcttctccaaaacaaacttttaaaaaagcttttgttaattctttgagaatttcctacaatgtattttgatcatattcatccatcccccaactcttcagagaccatcctccacttcctatccaccgaatcaccccaccgtgtgtgtgtgtgtgtgtgtgtgtgtgtgtgtgtgtgtgtggcggggtgtatacacacacacacacacacacacacacacacacacacacacacacacacacgttaatccatggagtcaagtttttgttggcccactacttctgagaatagaaccagatgttgccccattaaagaactaacatttcctttcttatcagcaatcaaataccaatagatcctcagcttcaagtgctctttctgtcttccacgatgggctcttgccggcgtgagcttgtgcaggtcttgtgcacactgtcacatcacagtccttgtgaggttgcatgtgcacctgctttgttgtgccccacaaacaccgtgtccttgaattcacccaacacctctggctcttataatcttcttacccccttttctgcgtagtcctctgaccttgaggggaggatgtaatatttatgttccatttagggctaagcattccaaagtcacttcctctcttcacagtgaacggctatgggtctctgacaaacaaaaatgcttggttccaccctagattaactgatttaaaaacttaaggtattgtactcaataggtctttattcaataaaccctacaattgaccctggtgtgtatttcaatttgagaactccttggtcttagggtcaaatcagagttaccaccatgttatatcaaccacattattgctacaatgaaaacctttacatttatatcaagacttttagctaatgagatgattctttatcttcatcccaacattgctgttgctattgtcagtagcaggtacaatgaaaaatgctgtcaaactctatgtcatgcctacagctagaaacaaacaaatctactcaaatgatatgactaaaacacatagaatcaaggcagaaatatgacccaagctcttccccaataaaataataccttagagaactcagagttcagggtccagtgttgtgattgtctgctgtgtatgtagtgagcttcagtagggttctgagcatgtggatatccaaggatgctgagtcagcccttaggataatttaggactctagtttgtaccatctctattggagaaccacatgagtaaattgtgcttttttgttttgttttgttttcaggcaaaatgttcaatttgtgccacctctataacacacacacacacacacatacacacacacacacacatacacaatctgacttctagatagactctagcacaaagatctatactccatgcagcaaaggttctggaaaatagtgacaaagtagagctgcctaatgtcttgtacatttggatagccatctcatgtgccttggtgttcagagtgtagatcccaaagaatcaaaaggcaaccatgagaaagtgggaggtaatttttccacaaagggtagcgtggccagtgaggggtcagaggaaatgagtttaaagagccacactggttattgcctgtgctggactgaaagtccctgagacatcatctaactcatggaaaaggattcatcaggacaggtgatgtagaacaggacagcagaagctgtcctggaagatggaccatcctgtccctcatacttggtgcatagccagtgggtttttcctcctaacttattgctcaggagagaggcttatgaccttgttcgttcattttaagggaaattatctgttctgttgaagacatcttgggccccaaggagaattgggaggtggttctgaatgtgctaagtcagtggggataatgggtacagtgtgtcctgcaaaggcgcttcccacccttgcccattaatattgttaattggtcacaatggcctggtattaactttcccttcttactggctgattctctacgactcccaccccatgtacactactggctgctatgcagtaaatttcaggatggtcctaagtgcttgagatcagaccattctgttccccaccctaagctagatcaccagattcagttcttggtgtgaaaagatgctagtcatgcctaggcaatgacactgtcatcacaagttcgaattgacgggatcctctccagccatcaatcaagggcccacaaagaagcagcaatcattggatccctaaccattgtttggatcctggctactcttcacaagagctgagtcatttgagtgaagccacagaaatgctctttatggacttctctttggaaattgtatatctcagacctgaaattaacacaccattagttgaaaagcagttgcaagtagtgcaaatctaagagacacctaccctcttaacccccaaacctttgcatgtactattcccatggctcacacaggatcccctttctctcatctagcacttctttgctttgagtctcagcttgcactttaaaaaggactcttctgtgcttctctgaccaggggcaggtctactgattcaataattacctgtctaagtctgagattccagaaaagatcatgagggatgctaattagctggcttaggctcctactgcgataagccctgtgaggtgggtgcaagaatgcaggtggctttattcaccttggggcttcagaacctgggaaagcacctgacatgtactaggcactcagcaggtatgggtctgactagatatgtatggtcagaatgaagtacagaatcagtccagagggtcgagtcagggaagcagctaaggcttggcttgtcatgcactgtactgtactgtaccactctgtccccagtctgaaacagtgctacaaaactcatgggatgtctcctagttaattctcaacctggtattttagttctctaatctgtcaaaaagagacacgaatttgggattgcttaggcaagtcagccgcagacagggctcagtccattctgacctacctcaaccagagactctccttcccttctttggtgtttgtgttataaaatatggttctgtggtttaagcggagcaagacaaatggaaagaccatccatctcatcttgtaccttcatgtcaatgagaagaaaagaaagttcgagggaagggagatcttttcttctgtgtcactcagctcagtgtcagcttaagaaaaccctgacttctccactccaacatgtctgcatatggaaggaaatagggaaagggaggcattgatgttatgtggcataaagggctgggctcccgaatgtgatggagcagatctaaagggctctcagatagccatgtacttcttttgaatgctcacatggacagatgggctgagcagtttatgttacttgtgccaagctcctagaggattgtttctgagtaagacagggtgcaagtggagggaccactgaaagaactgaccatggagtacctagccatgccctcacacctattcatactcaagactaattctcatctgacatttatctcctggttctgacacttgtccctgacaatttggtctgtttttaggccatggagggctgaatcaactaggaggggcctttgtgaatggcaggcctctgccagaagttgtacgtcaacgcattgtggacttggcccaccagggcgtgaggccctgtgatatttctcgccagctccgtgtcagccatggctgtgtaagcaagatccttggcaggtaagcacgaaattcaccacataccacttttccctgcaaggtttgtcttctgtagtcaacctcatagctgctggcccatgtaccatcggattttgtgtttttcaaggcaaaactttcagaatatcatttacaagaagtaatttaagtgtttgatgaaatccatagccccacggaacaaacctctcaggtagacctgtggctcttgtaggatgaccaggaagcatgaaactcagacacacggaggactgagaaccatccatctgtaagactcaacgtggtggttcactgccctggctgtgccagggaactctaaacaatcaatcagaaggtcaggatctaggctccagcacaagccaataaaagggagtggactcaaatttatgtacatcattggcctccacctcactgaagtgattttgattatctcagtcggttggggctgagaactgcagggcacaggttcagaaggacaaggaacacaaagcctctgacatgtccatcagaaatattatttaagtagagagtttggaaatcccagagttccatgtcctgtccaccttactctccaacccaccacacagacccacatgtaggttcaaggtttcccttgaaggggctgctctaaacagaaccatagagagccctggctctgcctgaaatcgctagagggaaagtggccttttcttagggaagaattttgaatggcaaggacaatggccttttaaaagactcatgctttgttttattcattggtagaagagaccagaggagacaaggaagaccagagtcttaattaagccactcatctctcagctagttgtgggttagatgggctctgaaggagggagctcatgtttaggggttgactcaggtcagggattctaagtgaggctggacttcagaagcagctttaacttgaaccctggaacttggcagaaaaccagagagcaaagggtgaaggagatggctcagatttgggcaaggcaaaggtgacccagcaagacagcagctggctttcctgagttaggccgggagaacaaagcaggggagtcagggagtcagtcatgctaagagaaggtggatgagagaaacagtcactgcaagcctgagattccccagcgtcaacactgaaacatcctttctcacaaaggtgatctttgtgggctttctgatgcaaatacagcgagctggtctggggagaagcctttgcagaggggtcttgctttggcagtagcatacatctacccaaatacatgaattcttggagagaaatccagtgttaagatgagcaggagtcaggggagggccatgtctcagttccacacctctcctcaggagactcaggggggacagaggctctggccaggtccatgttcaaaggccccacctgcttattgggtaattttggggggttctctattggagtaggtactacgagactggcagcatccggcctggagtgatagggggctccaagcccaaggtggccacccccaaggtggtggagaagataggagactacaagcggcagaaccctaccatgtttgcttgggagatccgggaccggctcctggcagaaggcgtttgtgacaatgacactgtccccagtgtcagctccatcaacaggtgagagacagcagtttatggcaccctcctgggccctagggttctggaagagtcctgtaagaaacacgaagggcctggcctgggtggagtattgttatttggatgactctttaatttgaagaatcaggcaggagttcctcggcctggcacaggccaccccttccagccttctcttgttcctgctgtggcacctccctctctccccacactatgttgtgcttcctcaaacaccacatgctctttcattctgtgaaagaagttcctggcccccattgactacttggtcacatgtgcacttttgctcactaccttttcatcacagttgctcactcattcattcacacaccattcattcgcttattttgtattagttcccagaacacagaatccctgtccttgtagaattcacagtctaatggtaacacagacacagagtacccacaaagacaggggaaaaatgcagctactggtcctgctgaggctaggagtctgaaaacagcaggggtagcctatggtaacttgtcttagggaagtcatgaaagcttttccttaagtaagaagcagtgagtgggaattaactgaattagcagtgaatgggaattagaagaagagggataccacggaattttgacatagcatataaagggcctgtggttaatgagagcttgcacaaggagatgaaagagagtcatttgagatacaagaaaggcctgagtacactgactataagatgccagaagaaactgcccccaagaagcctgtgggcactggaatatattcctgcctttgatgactgtgcagcaggcagccattagagccattagagtattttaggcaggaagctgatttgtatttgaaaacacttagtctggctgaaaagggcagaatcaattagagtaagtggggttcaggaagggccacttgaggagcagagcagctggtgggtggcactcattcagatgttaacagtgagatacaaagcaggaccaatcctggggtctagcaaagttaaatctacagctccctgttaatctgcagctagctatatgtgtgccttgaggcagccatgtttctagtcttgacatgggacttgagcagtcaggtatgagaacgaggtaaggccagtttgacagtaaactcagcgagttgaagacacatttaagatctccaagtgggttgtcatgaaggtgagtggactcagggcaaccacagctcctgtttcatcctctgtctctaacagtccttctgcttccccacagaatcatccggaccaaagtgcagcagccattcaacctccccatggatagctgtgtggccaccaagtctctgagcccaggacacacactgagtgagtgtttagggatttggctgtctccatacctttgaatgtaaacccgatctacacagccatacagacatagacatcgccacatacagccacagccacagccacacaagagcatatgactgctcatatgcctgtacatggactgagcttttaccctgaggcacagtctatttcaatgctcatgggatactcatgggaacatggtgaaatggatacacgtcagacaaatgccattcgaggaagccttcctaccagcaggtccttgaagggctgtagctctccagggcctctgtccacagcatagcctgctgctctgcatccatggtggtgatagtggctatgtagagtattaaaacctatttctgatcctctccttattcctttgcagtccccagctcagctgtaacacccccagagtcaccccagtcggattccttgggctctacctactctatcaacgggctcctaggaattgctcagcctggcaatgacaacaagagaaagatggatgatagtgagtgctcaggggacctgtgggtggcatgagacacaggagagcacttggctcaagctttgataggaagacaaacctttccttccatggccctggcttagtagggctctgaggctccctttcacaggagcattggccctttcccttagcttgttctgccccaacctcttcaccccatctgctcctctgctttggagcactttgacctggtggcttggttgaggagtctcctgaaagctttcttcctgcctgggggcactaggtgaccaggacagctgtcggctaagcatcgactcacagagcagcagcagtggtcctcgaaagcaccttcgtacggacaccttcagccagcaccatctcgaggcccttgagtgcccgtttgagcggcagcattacccggaggcctatgcctcccccagccacaccaaaggggagcaggtaagaagctgggatgcaagagatagacagggtaggcaagcgccaaagcaaagcatgtcctctagccatcaaaacaacttcaaattgctcccacgggcttcacgcacacactttccagcttcacgcatgcgtgccttactcaccatatgcctccatacctctctcttctcacaacccacatctgaactttgaacctagttttgctttcagggccatcctttttccttcagtggctttctccaacaatagaatcgggctcacaattgtagttaaagctcacacccttcttatgatgacctcaacaccattcctagccctttgcataatctaggattctgtgtgactcatgtgctcaagctcaccagcctcattcacacctctctgtccttgtacatcatgtgccctccttgtagaatgcctttcttctcactactctgcctggaaaaataccagctggctgtgactcaggtcagtcacacactctatgaatttgtccctgcccctcacctacgattcacaccttgggaccctgtcatccttcctgtctcacacatgatttctattgacttctcacagtatttcctaataatctaatgggggtgggggaggtaaaggcaacagacttaggggcagggtggcctcttgagacacctcccccatctctagactcattactattattacctacattattattattattattattattatttatttattattactttttgtggtgatggagatcaaacctagggtttcacacacacacactagacaagccctctccctttgaagaatatcccaagctcagtattttaatagcttttcaatgaaggtatattgaatgaatgaaccaatgagtcagttgagaaatcaagaatgataagatacaacctacaggaagatttcctctccagaccttaggaaaggagaaagaaatagattataatggaatggcttctgtaaaaagcaggcaatgaacattcccctaccgaggttgacaaatattccaaaatgcaaacaactactaagagacattttctatgatctgtcaatggtcccagtgtctgcctcttttattccatctagtcaaacactccaggaaactctttgggctatggctagcctatcactgctcttggcttgaggcaagcctataggtacaccttgaagccctgagggagacaatgatgatgatgatgctaacaagcagctgaaacattgccagcaaatggctgggctcctggccttgtgccaacccccacaactgggcaggcaatatgcgtcagtgatttttatcagctttggctatgatagctgtaaatgttgtagacaaagttggctattagcagacccagggagaggcctgggtatacttctgatagtcagagcatggttccagaaggcaagtgttgagtctgcagaaagcttattctatggtagcatgcaaaatgcaatacgcatatactagctatccttagagaataatgaatcccttctgaggagaccctgggcatctgctgggtcccagagccatttactgacttcatcggtaagtcctccaacagaccttgtttggttagagagaacccctgtgctatgctggagaatatgcaaggaggatgttaggatgggagactttagaactataggagacttggtggccacacagcttaccttttcaatttgtataagggtgactcagtgcctggagcatgggaggacttggaaatagatgttgcagagtttatggctgccagctctagttttattcacaaggatcattccacccttgcatatttttgacattgtgatcccatggattttttgggggggggcagggggagtccagacatggtttctgtgtgtagccttagctgtcctaaaagtcactttgtagacctggttggcctagaaatcacagagatccatctgcctctgcctcccagtgctgggattaaaggagtagcccaggacattcttacataaaagcgaaatgaaaccagaatacttgaaaatcattaagcttctctaagcctcaacctagaggagtaacctgtccctcagctactccttccttcccccattcagtcatcaggatgggttgtgagcagcagatcatcctaccttgaaccttgctcttctgcctactatgtctgattgtgccacccaaaaggaacatgtcctcctgtccaggcacagaggcttggcatctttgggaggcaagataaaacagatatttatatatgatcttagcatggaaaaacaacaagggtaagagtgacctcatttcttattgcagactcacccctaggtaatattagaaatatgtgtatccttcctctatattttaaactcaccaccatgtggatcaacagaatgagagagaaggctatgaagacagaccaggaatgtagcagttactaactcttccgtagtaacaatacacctattattacttctagctgaaaatctgtgcttgctgagtattctgtgccacgcaaaaatttatttaaaatcacagttaatatttaatcagtcctgtgcggtagattctaggactcctattcttaaaggtaggaaaaaaaatcaaggctcagagagctcaaataaattacagcttcctgttgtagaatcaaaaccgtgatttcatttctgaatcattatgctctcctgtccccaactcatgtttaagctcagaaaaaaaaatccattcatcattggcatgtttaagacattgaacataacatcatctggttctctaactttttctttgggctgagtttggaccagaaacttgatttttagtatgtattttgttgtcaagtcaacacattcacaaggcatttcaaacttttcttacagtctctagaaattaggtattttgttcagtttcactagagcaacttcgccttgcctctaagtaggcccctcagaagaatggaaccagagtgccacttagtcagtaattgctgctacgtgctgatggtgccctggtggcctccagaattgactgcagcttccaaaagtgccctgcatgcaaccagaaagcattgtgactccttggagaactgagctcagtggaaattactgaaaacaattgtcttcagctgagctgttatataagcatggactgaccagtcctgcaatccagtcttgtacaacagttcacataatactttgtgaaatatacggcctgtatgtggggagtggatgtgtgctgtctttccttgggaaggacagcagagagccaatcgtggcctgtagcctaacaaattatcttctcaaggagtagccttaggccataagcatgctcatatcacggagtaccagtaggagatggaacgactactggtgctgaacataaaccccaagtgcttgatagaatttttaaaacaaaatgaatcctatatatctttcaaggtgaaactaaatgtttctatttgcatgggtcatgcaaatctgacatagtcttacaggttgtaccagtgggttattcaataagaatggtagcagcacaggcagaccgtgagctctctgcaagtttaagaagcgatcactgtactcagagtaggtgtacctgagcctacatccttgcatcaccttacaggagaggggttgtacttccttcagctctgcacttgcatttcctaagtggggggatcaagtattagtagagtaaaagactgagcagcctctcctgcaaccaatttcagctctaggcaatgttctgtgtttggggtctaagccatgtgaaaaactaggaaggagatcagcaccctgtcagggcatggtcctctgatggccagtctatcacatgcctggacttctatggcaacagtgggccttgaattctggaacttggaacggggagccataagccaagtcctgggagagttctggggctctgagtgggagagcatgctatgtggagctaagagaaaacaagaggaccgagtcagggtgcttttcttaggaagactagcatctcccactgcagagacagacaggagggtcagtaggaagccaggcttgctctacccctgctgacttccctttgttctccaggggctgtacccactgcccttactcaacagtgccctggatgatgggaaggccaccctgacatcttccaatacacctctgggacgcaacctctcgactcaccagacctaccctgtggtggcaggtaggatgcctagaggctccatctggactctactgtgagggtcagcatgggtttgggggcaggaggaggccgatgcgtctggctggcaggaggaagaaggtgtttggggtactggcctggaaaggagaaataggctctgctgactgggcctcaaagtggagcaaggggtggtgccttcagtctttggaccccctggatctccccaatccttctaacaaggagaggccgagcacacacagacttcagtctctcatccatctacactggcagaaggcacatcagagaggtagagcctgcagctcctccatctcattccatccaaggaactctagccatggctctccatcctagactcctcctacagcagccaggcctgcctctccccatacccttgccccatctcatggcttggtttgtgcatgttcccaccccatcatctcacacccctctctccttgttgtttccctccctccggcagatcctcattcacccttcgccataaagcaggaaaccccagagctctccagttctagctccaccccttcctctttatctagctccgcctttttggatctgcagcaagtcggctctgggggcccagcaggtgcctcggtcccacccttcaatgcctttccccatgctgcctccgtgtatgggcagttcacgggccaggccctcctctcaggtacgacagggacgtccccgggctctgtaggtgtcgtggggtgggagggaggtcaagtcctcttgtctgaggctaatcttatctttaggctaaacatcatcaccttgttctccaatttatcaagcacatggttctctccctatgggagaagtcaggagttagaattagccactttgagggtaccagcaagtggaatataccactgcatcttccaagcagaacattatcccaactagtcaggacccgagctatgtctgaaggagtcaaggtttggtttgggcacaggcagagacacttcaaagtcttcagatagttgactgattattaatacagggatcctgggatgggggtaggggtgtcccagaaccaagaagggaagtaattagtttccagttgatcattggaagtctcctgtgtgagagagctgtctccattgattatgaacagtaagtgacagagagcatgcctccctgtctcctgctccctgggccctgtcaccttgagaggttaaagcagacactgggagacttggcagggacaacccaggttggatagtctaagccatcggaaccagctgtattccaatattctaggcctgtcttgaaacttaaaatgaaagccttcagcatgccatgtgtcccagccagagcagcagagtagttctgaccgaagctggagcactggcttgagaaactcagaagtgtgactttgcctcccactggatcagaggtctaaaggccctgggacataaacccaggcatgctttcttataaatgacagcgttttctgcttgtctgacaactggtatttccccttttctgcacatccatgcaaccttgccatggagatgggcagtgtgagggcagaggcggtggccaaggatctgatgaaagaatggttcacttgtagtttgaaatttcaagagggtgaagtcagcagagatgggtcatttgttttgagcaaagtgattaaaatgcacaaacctgtgagcagagtgatgtcagccagagactatggaatggggagtggagagggagagagatggcttgtgtctgctgtgggagcactcagggcacacttgtctgccttgtgagaatgagaggctgagaagcagctaagggacctaagaggaacacagggtgaccagacttgtgggtccatgtattcaagaacaagaagcaagttaagactacagtttggagagccaagcccagatctgcagcttaaggacaaggcagacatatgccagtgcttaagtcggtttaaggatcagtgcgctgtcctcagagacttcccacctaaggcctggacaagcttggacctaaatgctcatctcttggctgagccctcatggggttgagagagcatagtaggacagagggattttagagatggaatgagcttaaggaagcagagagcaaatcatttctgtgatatgctgcagaaagagagggtggaggggaaggtcaggaaatctcctgaaattagcccagctcaatcctccatggatcatcctagccccctcctctgttcgactttgcctaagaaccctctgtcacctgctgaaacgtatccctgctccacagactttctctctgagattctgtgagtatcatctccagaagaccgcttctgagcatcagctttttttttttttcgtcatccaagaaagggacaacattaggacttgggaaataatgagacttacctacaattcagctagtcccctttagaacacccctacacacacacacacacacacacacacacacacacacacacacacacaccctatggattccagcccactggccatgacagtgacatcaaggacacccttgtccttgctattgcaaggctgactacagctcagatgatgggaaggctgccattagcctttcatcatcaaggagcccagtatcctcctccattcttctgtacaagatatatttagtcttgccaaagagatttctgggttgccataaattctccttgctatcagaacaagataaggcattgaaaaggggttacacagagggcggacatcaaagaggtgaaaagaaatagtctcaaatcacctccaccctctggattccttcctctagctaatggctttctattccttctcgctgcctctaattagaatatttaccaagagttctggaaccctaggattttcctagggaatcacactttgtagccagccaacctatgttgatgcttctgtcgacaattttaaaagaggctcttgttggaagtctacagagagaccgaattagacagtagggaaacgttgaagagcctttaaaatagagtaggctcgagggtgtctgaccagaggggaacatctcaatctcagggtggcagcatccgtccttgtttcctagattgtttaagattctttgttgttgttgtttgtttgtttgtttttggttttgagacctcattatgtagctcaggctgccctggaatttactatagaccaggctggcctggaactgatagaaatttacttgcctctgtttcctgagtgctaggattaaagatgtgcaccatcacacctgtcatagtttaaggttcttgactctgaaagactttttttcccccaatgctgtcattaagtccaaaccacacaagtgctctgctactgagctacagccccaccttacaaaactatgttcctcaagaaattctggaaggacggctcagcaattaaaagcttttttagaggttctaagctcaattcctagtgcccacatagtgagtggctcaccaccctctgtaactactcccatgggatttgattccttctcatggtgtgagggtgcacatacagataaatctcccaaatacataagatacataagtaaattcatattttttaaataaatgaaatgagagttttgtggagctgttgagacaatatatgaaggtacagtttagatagggtggtgtcctggaaatttttttttgtctttccagaagggccaggttttattaggagaagtctttggggctctgtttaggccattgattcagaaatctttcttgctgagagaaaactaggtagctgaagagaaatgaagattaacattcctgcatggaggggcagagaccaatgatttttttttcaagagctattgttcatgggttgaggccccaccgagagagatcatgagttaaactgtgacctgaggtatgtgctcaggaactctgcgcattagacagcctatataaagaagctacaggttcaggggacaggaagtgacttaggagggcaggggaccacaggctgccagtggcaggagggcgcccagaacaactgacattagcaaatagatggccagagagcaaaagtaattgtgatccatggaagaagtgggccctgcctcaaaatcgtccacactctgtgcaaagaaaccccaccagccaggaagtaagatgaacctaagttctaggcctcctgtgaagactataatttggagaagttaggcaatttgttcatagtcttgcatggatgtaatattcagtctcagttttaaactctctctctccccttctccctttccatcccccttttcctctccccctctccctcttcctttctcccttgctcctccctccctctagctcttctttctctctctcccttctttctttctttctttctttctttctttctttctttctttctttctttctttctttctctctctctctctctctctctctctctctctctccctccctccctctaataaataagaaagaagaaaggcaaaatcatgaagcctgggtcagccaccctctcccatctctttctactgtgttagccactgcccggcaccctgcttctcttcctttacagacccacatcctcacactcactgtctgcatcttggccaggtacttcacacagggagggccaaggggacagcagtgattacattgttggctcctttacatgaaactcaaggctattttgggtaaatcttctgtttattcctcattctaaatatgtctaatcctcgccacaacttttttttaagcagcatctccctcccttcctttgttctcttgatgcccttatgtcagagaccacttgtgtagtccaggaccaaccagatctaggtactcaataaagacggatcaatttgagacagatgttcaggtgtctaaaaaatcctaaagctattttaaataacgaatactaacagcttatttctgacaggatgattttctgtaagaacttcactgatacatttctagaatgtgtccattgcactaatccgtgtccacctggaccatgaggcaacaggttgaattatgttgataacctcagagttgtaggactagtgtatctaaggtcacacctcccctgcccctttgcatgcaaagtaacaggtttaggagcagagtggctggtctaagggcagacaaagagccatgaaagtagggtgactgttgtagctctctgattcctagcctgttctcttagggaaaagggacactcttgaatgtgcaggtattgtttgttgggttggccctaaagcctgtcttagtataagatccattaaacgccttccgacctctttctctctcttcctctctcccctaagtccccaagtgcctagtccttagaaccatctcaaaagtacttcttgaatgaaaaaaatgttctcatgggtaaagaagaattagtcactgtggggctggcaatctatagggtttcatgatccttcaggaggtttaggtataaaggatctaggagggcatggggaaggaagaagggacaatctgtgacacagagaagatatgtctggcgagttgtttgacagagattcacaggcagcctcagaaaggtgacagaaagcatttgacccaaatgcctatcatctaacatagtggtttctctaccaggagtgatttttatcccctgcttccttcacactgggacatacagcaatgtctggagacactttgggttgtcacactgggtgggaacttgtactagaatctgtggggtagtggccagggatcctgcccaataccctgcaatgcacaggacagcgacacaacacatactttaccagtcaataatgtcaatggaattctataaatatcactaagaactagtttgtccaaattattcattattcacattggagcattttaagagttgaacgggcattgttaataaatattctgagtcagtggacatcacatggacagacctcggaaaactaggatatgtagattctggtctgaacctagagagcagggtagcgaggaggcaagcagtgcttctggttattaggtaggggtggatggggagagcatcggcaggtcaggtggggtcctgcaaaaggagagctttactccttgatgtgaaggaagtacacatccaatgagatggggttccacaggaatgccttggtgtcactaggatgtaggcatgacacaaatcacagataagtagagattgatcagggatgaaacatactgaaatgggaatttaaagaagtataatatgaccatgtgtaaatgttagcagtctctcagtgatgttttcttttacgtcaggaacagtcctgtttcatgtttcatgtccctttctattctgattaattatatccacctggaagtccaggccaaccagtgggagctttctctgtggttgattatcaatgtctaccacatgtctccaaaagacagtgatggatcgtccatctgcctttatttcacaagacctggtttctccatccttttgaaagtggggaggaagtggtgtgtggcttcttgtgtatttatttagtccattggtgccaaacattatgttggagggagataaagaccaagaagacgccacccctggtacccagcaccttgatattttggtggagcaataaagcaatatttgtgaaaataaagctactagggaacggggaacagagaaggactgcagttgcctgggcccccgcttggtgagcctctgccctccagagaaaacaagagagaagagtctggagaatgactgtggctgaggagagacgtgccgagcctcaggaggttggggtggtaagaatgggagccacccgtacaccaaccaatgactctttggtgtcttttaccagggcgagagatggtggggcccacgctgcctggatacccaccccacatccccaccagtggacagggcagctatgcctcttctgctatcgcaggcatggtggcaggtaagggtcgaggggctgggcataagcattgcaaaagggaaggaagcactggagaagttgagagaccataggtgatgaaagacaggctatgtctcactcataggcatcccagaggacactggctcaatgggctcccttcatagaagcacctagagagaacctccactaccgtcttggctccttgactcctcttagcttagccttctgcttcccagaccttccacacagacagacctatgcttacattcaagcacccctgcctcctcttcagtgcattaaagcggaagagtaagcagccaacactgagataagcatgggcctaagccctggactcttggagtttaaatcaaataagatgaatgtcagtttacctctgcattaaaatatgaatttgaatgatgatgatggtgaggataattatggtgacggtgataatgaacatgatgatgatgacgacgagatacatcttcctttgcattccacactcaacaatgagtggggctcaggttctaactaccctgtggatgccacagagtatgaacagtccttcttcacactcttttggaatgtcctttacagcccgtttgatgtctgtctgccaatcatgagctattgatgtcccaggatgccagggtctggacaaacgggtagagtaatgacagttttttttggggggaaagtgccagtctttagaagccatgtcagaaagctccaggatgggtgggtagttatagtagaaccatttccaccgcccagagaggttaaagggcctgaagcttttggggagggctttgaactcaggccacgtgtggcctcctaatacaaaccctctaccaaccttcctggctctgaccctaaagaccaggccccattccaccaagcatgcttccccctggcaggggttaatctttgccagccacccacccactctgggcaccctgagcgcaggcaggtgggctgtgttctcttagacagagggagggagggagcaaggagagaggaggctttgctccctgggaacctgctgagctggcacttgctgctgcccagttactgtggcaatgtgcttaatgcagcgttgaaaatacagcatactgactcctctctcccgcctggcccggactccctctctccctccctgcctccctcttgtggagcgtgaaatgagattggtcaagataaaaaaggaaaagattcggttattttttttgagtgtggataatggggtctctcaatcaaaatcctaggctccagtctgctctccgcctcccgtctccaagccctccacattccctgctgcctgtttagaggggaaggaagtaacacaaggcacaatgacaattactctcctaattatgaatgattcttgggagcaggcttagggcaaggggtccctgggacccgagtgtgacctggaacatagctgccctgagtggaaggcaggggaagggtggtatccaggaagacctcacttagagcgggtgctgtgaagaagtactctctcacacagtagcatactgtgagtacacacacattcattcactcacaacacccgtcacatggattgcaagtgaattgcaaaagggaagggtctcaccataccatgaatgggtttctggtaagctgtgtacacgttagtttcaggaactgcaatgccattaaagtgaaccacctggttcttgagagcactcctacgtcaatggcttctgaaggaatggcttttgtggaaaaatgacatcatatctgtctcttaccaccacctaagatgtctcagttgactgaatggggattctttccattaaagtcagttaactcattaatcacctcctgcatacatgtaagacacgtgtaaggcacattaataagggcttcaaataaggcatatcagctacattcctcagtcagttttgtaaaggaatattttctgaatacctggccatttatatgcataattttatttctctttagcccttatagtacatcttggtggcttataatacaacttggtggaacccaagttttatagctaggaaaccaaggtttacgagaaccaaatggtgtgctcaggcatgaaactaagtgactaagtttttcaaacacaaatttattgatttaacgtctgtgcctctttccatcttccctcactgtattccatcatgccataaataaagatgcaacctgtggtctcgccctacaaacagttaatggctttcatatcagttataaaacagaaccaacagattagatggttagagtcatcctgacatctatccatgctttcttctatgcttctgttttctctttccattcaactatttccttttttatccatccatccatctgcatattcttatttatctatccttatatatacatgtttatcatctatgcatgctttcttctatgcttctgttttctctttccattcaactatttccttttttatccatccatccgcatattcttatttatctatccttatatatacatgtttatcatctatgcatctttctatccaccagtccatccatccatccatccatccatccatccatccatccatgtatgtcttttccttcttccactgtaaccacacttttacctgcctcctcttccagccattcccaatccattctctcattattaatatttctattatcctcacctttctattattctatccaaccttgaaccctactctatgatcactttgtcagttaacaaataccgatgaattaacaaatttctgggcctgcggaaaggcacaaagcacgctttgctatttgtggtgatggacgagcagtggacaaacaagtcaatggctgagtaagcatgttatcacaaaaagataagtaggaaaaggcaataaaatgtggtgatgcagtgaggagccatggggagaggagataactatttcagattgaatatacaggaagccttcctgaagagattttcaaagtggccagtcaagtgataaactgaggctgaccatcccttgccccaaagaagaccaagtgcaaaggcccggaggcaggaagagctaatttagcatggcagtgtacggaaagaagatgagcactggagggagcactggagagcaggggttgggtgggggactgggtagcagcagggatgggttttagaacacttctcagatgcttggggaaatagactgtagatacagagacaaggcagggggccattgctgatgtttttgtaagggacaacagttgctttagctaggaaagtagccttgaaggataagataggcactcagtatgctttggtgataagtggaacaaaacctgccagcaagttgactacagagaggagaaggagagatgagaacatggaatgggtgtctgtagagtgagcttgggagcctggcgggtggtggtgaatgggaaagcgggagaggacagggtgtgacggaaaagcaggagctctagctttggccgtaacagagttgagacaattaaccaaataccaagcttcatctctcagaggctttaatatggagctgctctaaacatcatttggagttgctgctattgaagagatccttgaaaagatcagatttggatctgaggcactaggtctaagcacctagatcatggcctgattgtaatagaatgtgaagaacacaggcagaaaaagaggaagtggcatccgatataagagcaaagggaactggactttcctaggcacaatggcttttcattatctgtggttatatacagacagagccacactgcaaggtgtatgtactatctacccaggtgctgcctctctatcttggcatcccagagactgaggcaaagatgcatgtagtgtacattaaataaataagtggtgggtgactaaaggcatagcgtttttgcaacctacttttaataagggttcaacctcttctctggtccaccacccagcagatgtagcggaagagaaaagttattaggatatgggggaagtgggcctgttcagcaatggttctttcggggcaagctccatcttctttggaagcagttcaggcctgtagcaaacaccaaatacaattcagcagcggcagaccagtcctctaggcaggccgacaccaggcacacaccaggtacagaccagcagccacagtccattcctttcagcaagcagacatcggacagctgtaattcaatcctgaagaaacttccagcctcaccagcgggtctgagacgaggcctcagaagcaggaagctgctgcaggaacctcacaagcagttcttaggggagtttctctcagtgacaaattatcacaattgagctcaacaatgccatataaggcaaaccaatacatgtgagcctttagtgaagaatagctaggcggagcaatccaaatcaaagctcagtgctcatctcccagggtctgtggggccgtatttatagtccttcaccacaagtccttctatatcaaaacatcctttcacctgtgtctgcttcaggaaaacagtctttcacatgtttgctttagcaagacatcctttcacttgtataccccagaaaaacatcatttggcataactaactctccaaagagactcgaaatttccacttcaggtgactggatgcatggacaggtgacagcaagagaggctaagacactgcatttctcaacaccctcctgtgtcctatagagattgcagtgttcagcactgggaagtcagacaaagggcgtaggataggacccttactgtatggccaggacagaactggcctcctccgagagaattctgagagcagggaaacatctgtacaccaacaggagacaggctcagttcccaccgtaggctacaggggcaagcactgggaggggagcacggtagctaggtttcattcaattcaggctcctcttgagcgtcttggccttggaggaaaagcctggagccttctgcatacaagtttctccaatcctaagtaaatgattggattttatcatttcttagttttcctttcttctctattctcagccttcccgcttggacatgcattttcctccagttctgtgttgagatctgcccctaacccaaacactgtaagcttgctggctggtatggagcccttagacacagtgaggactcatcaaccttcccctatcgcaggcttccattcctcataggcatatgaccactcctccacagtgaagcagtgttgctggcccagtctaggctttaagatttgttgtgtgactgagctgagtgcccattgaactcttttatattttttgcacctgtttcaggagaaaaataaaaagaaaccaacatttattgataatgcctttatcaagagcataattctaagcatttaatattcactatctcacttaatcttcaccaaagtcctatgagatagggacaagagtttgcctcatatgataagcaaagtcactaaggcttgggagaaagacacacacacacacacacacacacacacacacacagagagagagagagagagagagagagagagagagagagagagagagagagagagagatccagcccagagctgaggagttttaaatctttattccaaatctgaaggaaggagttaagaagtcatgtaaaaagccaagttacttagctcacaatcacagatgagttgctaaaagactaaacatttttgaatataaaattgcctagaatctggctgggtttgtaaatgaagtcatctagcaagtacttgaaggaattacctggaatttatgatcaagagttctaaaatcaagttcctgctccatcattggtccaaagtgcaagctgagacaaatttcttcctcagtcttcacttaagtttcccattctataaatcggaagtgtgggagacgacttcataggacagttgggagagatggaaagggcatgatttaaagaaacatgctttgcaagctttaaaccaaatgataggtaagatagcctgctcacctttttgctgttgtgtaaatactttgacaaatgattcttttggaaaacccaaagactagctcacagaaaaagaagcccaacatccctcatataaattcaaggtctgagtttgcctaaagcaacttgattccctcttccactaccatccccctcttcctgccgtgggctcctcaggtaagtttcttctgtagaaagtccaagcagctcagaaagtaaaatttgaacccggcttctagagttttggcagtttccacactacctcagactttcaactggtgtgagtttctggagcctcactttctttatctggaaaagagagagtatgatgtctgcctcctggagctcttacaaaggagctgcccaaagtgacccatactgtgggacctcctgagctccactgtccagtgccacccatttttggactcagccctgtcagccccacagatctgtctccctgtcccaatcccctgcactggtgtcatgaacctcacaggtctcttgcctgtgtgctccaacaggaagtgaatattctggcaatgcctacagccacaccccgtattcctcctacagtgaggcctggcgcttccccaactccagcctgctgagtaagttcctggggttatccagaccctctgatgggcaggggagggttgggggaggggaacggagccagaccaaattgttgggagaccccaggttaaatgaaatgtctagagagatggcagttgtttgtcacagaagaaatcagcaacaggtcaccatatctggtaggtttaagggcgacaacagaaggctaaacattctacctcttttatatctgtcttctccatagccatgtctgttcaaattttgttttatgtaaaattcaggaatcaagccttgaaggtcaagggtagagaagggctaagttacactcaagcaaagcctatgaggggctgtcctgcctgtagggacttacagccctgccaggagataatattcaggagttctctgcccactgttagctgctcatctagataggttgaaaacagttatgagtaaccctccacaaaggctttgttccatttggtttcttgtatttggcttgagaaatgagtataaattcagggtttataccttaaaagtgagtttcagcaagtttttagactattttttttaaccccttcatccctgaactgtttggggacgattctgaggaaaataagaccacaatggagttcttttagagccttcttgagtggtagccctatcagttgtcagagcaagtctgaaccagagagaagcaatggtctcaaagatctagttttacagataccttgacaaactggctggagcatctgctccctaaaatcccttcccctcttcttatatcttatagtcccagaagtgacccacaggggacttccttgtgctgttagacagataccttcaattccaagacagatgtgttcaactccacatttagtcagaaagggcaaagacaatgatgctgatggtgttaagaggaccttcatgtggagcttggtgggagtccctcaagcccagaacccctctgatcggccaggagaacaattcttttgggtgcttggaagagaatggtttggcctgccattatttaggtggggccagagagcaaccaagtcactctcattgtgctcaatttttgaggtcccacacataaatgttctctattgcctacttttaaaagcaaaagctcaaagcagtcatgagaagtagggggcaagaagctgtcatttttctggttagagactcaaaggtgaggccaaagaaagaggaaaggctggagagaagttaatctttgatgatcagatgggcgtgggggataaatgattaacttgtgctgtcttaaaggtcagcagatgtagaggaacgctatggtacaactttccctctgaccagcattgctgttgttgttttaatgtgtccaggttctccatattattacagctctacatcaaggccaagcgcaccacccacctctgccacagcctttgaccatctgtagttgtcatggggacagtgggaagaaccaggcaagaatcaggaggacttggcctgagacaggccccagagagtcacacaaaggaatctttatttattacatgaaaaataaccacaattccagcattgccgctcactccctgtgtggtcaattaaatgaaccatgaaagtcaggatgaccttggagaaggccaaactgtcctccaggattcattttgtgagtgacaggagttccaggaaacaagaaccacccatttcaaaagagacacagaggagaaatgtaccgaagctggcacccaccaaaggagagaaaaggggttcacgaagaacttagagggagatgagtctgagggtgtacagggccacctgtttggtcttcatctagacaactccagcaattatgaacagtatgcaagtccttctggcctacaatcacagcctagggccaaggctctacgtgtcagtcatcctagcagttaccaccttgagcctctactacctgcatctttctggggattcagctgaccttctatttccagttgctgtgcatttacaagcaccccttagcctctcaaccagtggctacccctttggcagcagcgaacctgtcccctggaaagttcagtgaggctctacgtagaacataggaagacacaacagatgggaccagccatgtcctctcctcaacagccttgccaattcaagtgtgctttctgcagttccagcccgcgcagccactgaagagacccccaaggccagcaacaagattccctctctggctcctcagctctttccccacatacaacctcactgtaaataccgtaaatgaaactctgtttcggtcaagctttcctctttccatcccccagtctttggtctctgaaatatctccctactatgttggggttttctccttcatactttttttttttaaaaaaaaaaaaaaagacaacccaccattaccacatgactcaataaaccattactcttggtctcaggtt

SEQ ID NO: 77 - DNA, 62049 bp, Pan troglodytes
  misc_feature (7234)..(8047): n is a, c, g, or t
  misc_feature (9270)..(9943): n is a, c, g, or t
  misc_feature (33654)..(34758): n is a, c, g, or t
  misc_feature (37482)..(38072): n is a, c, g, or t
  misc_feature (47780)..(48120): n is a, c, g, or t
  misc_feature (49713)..(50615): n is a, c, g, or t
  misc_feature (52759)..(52768): n is a, c, g, or t
  misc_feature (53852)..(54898): n is a, c, g, or t
ggatgggaacaaacttcagaaggaggagagacaccgggcccagggcaccctcgcgggcggacccaagcagtgagggcctgcagccggccggccaggtacgtcacccaggggttagctggaagccggctagcagtgaggacgggggatggaagaaaggagagggtcccaggaagcctggcagccttttccctcccaagttaaacgggataagactgggacagcggagggagtgggcacggaggttggagtctggagcgtcttcagcgcactcccaatccttgatcctcccgggaagcctgttagctaggctaggctgaggttggccctacttcgcctaaaaatcctcctactcctggcagacgatgcaggtgtaaaggataaggcctggggagggggcctgaggatgcaggcatcgaatctcatcgcatctcatgcccttctcctgggtttgtgcagggcagcggcaggcgcggcccggacctacgtgagtgagccccgagccctcggcgggctgcgagcgactccccggcgatgcctcacaactccatcagatctggtaagaacgcggtgtggtcaggacccccgagccgccgcgccgctgagcgtccgtgcgtgcgctcgggtggttggatctccagagcgtaagcacgggattcgcgggacccacccgcgtggggacccagctgggggcgcctggggcctggccctccgctggagccgcctcgctgttctcgggcactggggttccacccggccagctgagccgcccttcccaggtttccagggaccccatggaacggtgaggggatctctgtggagttagagggggtttcctttgagctccattcccagccttgcatggcgcattagtgtggacattcttcgtgctctgtccctgggctgcaccggtgctggacttgccgtttccccgtccccgacctctaagtcctcttcctcgggtgcgcgcagtccttcccagtgactcccctggctggactgtgagctccccgcatctctcaagccaacggcaatggagccggtggtcccgggcctgggagccggcagcgcactcaggtgctctccgactcctcctggcccagcaccgggcaggcagggagccgcgcgcggggcgtccggctggtgaggactaagccgctcgcggagtcaaaaccccctccccacctgcgcccggaagcagggccttcaaaaacactcaagctcccaggccgcgatgcctgttttcccccttcccggccagggctgggcagggtcttcgctgggaaggagctccagggtcagggctggtaggtgcagccgtccccgcgcgcagcgagcgcggacagcggcggaggcgcagcgcggcccgtagtgatggatggagcctggccggccgcacagaaggcgatttatggggccagggcgcatcgctatcgatttgggccggcgaagtgagaggaaatcaatatttcagaatgaattctccgcgaatatgaagtcccgctctgcaaacgggacatgtgttataataaggagggtcggatcgggcgcggagcgaggctgagatctctatttagccaagcgcactgcgggggcccgggctgtgcggcgcagtctccagtcccagggccagggctcaactaggaggggagcgggaaccccctggggcgccggaagatttctcactcgggttctctctagagctgcagacgaatgctccctcccggcccccattcccctcagagacctgggccagaatcgtccggctgcccccagaaggcgcggggtcccttcaaggtcctcagggtagagacctcgcagccattccccggcgcggcggggttggcgagccctgggaccgagcagagctccctggcacctctttacggtccgcgccctggaaccacgagcgctcctaggccattgtctaaggtcaggatcaggttttagtcccttaatctttagccaaaccgtggtacgataccagacatcgccaggaccatccctgaggcctaatgtgcagtgcccggtgcccatgccaagctggtccaatggcacttctgctcggctctggaggtccatctttcctcctaaccttcccctgacccttccggcggtggcaggaggagtgggtgctctcggaaatcaaattcactgtggccgggctggacccttactctctgccgctgcccaagaaatgagacgatgtccccgtccctcagatgagttttttttttttttttcgcggctacttattttcattctagaagtactcgttagaatagatggaaatagagtatggaaagagtaaaaaaggcacaatttatttttactgtagttttaatcagtaacagtcccagatgatgagatgcgcgctttcccactagcttggatgcaaatcgcgcttgggttttgggagggagccctctgcccctggacctaccaggtaatttttttccccttcttcttttcgggaagacagaggggcttcttctaccccctttccaaaacaaataaacaaagtggcgagggagggaagatgagactttcttctcatagtttaatttaaacgctaataaaacaagaaaatggcctataacagcatagactgctgaaggcgctccctgtttcttttctgaaccctccctcggcaaacctgagggagaggccgtctgtctttctgatcagcttacctgacactgttgtctataattggagctaaattcataagcgcacccctcttgtttttacaagcccattttctctcgggttgtagcagcttcccccttttccccaggcacccctattcctgagatcggtagtgcttagggagctccccttaagtgttctgtgagcagagcccgggacgcgggcagccacacggcttttcgcgggagcgaggccgagcgcacccttcccaataaccggagacgctcaggaaaacttccctgcgcggcccccgccgcccaggctgccacggctgtctcgcctcgtcgctggctggtcttgccttgcagagagtcttagcattgtctttcctacagctttattctgaaggaacgttgcacgcgaatcattttaacgtgcgcaggtcagcgatgggctgaacgttccttaaaatcgctatttttgttgcatcagggacgaaattctctaaagcaaaaacattttttaaaaaattcgaagatgcagaagaaatgataaatgccccatatctataaaagtgaaaacaatactgtgccaatgaggaagagagttttgtaaaagcaagcaggctggctgtcattaaaagttatcttaaataacttgtcgcagcgcactcccaccagccctgaaaatagttcattcaagtggtaaaataagacaaggcagaggacgatgtctctaacttcccagatgtgagatctaaagccccattcctaactcttggttttagaattgaggaaagtggaataaatgcatttggaaaggatctgttttcttcccaggtttcctgcctgggttgaaaataaggtttcagggaatggaagcaactttgaggaacataaagaggtattggggttcatcaattcatctttgtttcaagatggtttatcccccccaccctccacaatgcaagttaattaggagataatttagctaccttgtgaattagttttaagataagtatctttttaagctttgtcactttaattgccccactgattgataagaagtaattatttctaattgacacttttttgatgtctattggaagcatttatttggaactttttggggtgggaaggaaagttaattaattttatcagtctacccccaaaaggactctgcctaattttgttgaagaagacaaaggaagtgaaggaaaccaaataaaaaatcaatctcatggaattttaattattaagggacactttggtttaaattagagggcatctactaatataatacgtcaaaacgttctatttatggcctcaaatctctaatttattgagatgcattttataggtattcattttcctatggatacactcaacggccctttatatgcttccttcattttggagcgggttcctctgctgtgtaaataatttttgtgaaaagtaaaatctgtcaaacttggtatgcccagaaaaaatgaaatcatttttgtaagagccaattgtaagaaagatttactaacagtcatccttgttctgtaattattgatggagttgggtataaaggtgaaactttacttacagtgacttgccttttcatacctaaaccttggagtaaacagtttaatcattcacatcctccagaacattttgctgtgagagagaaaggagtgaaagaataaggagaaaaagaaagacactgaaaggaggcagtgggggtggaaaggaaagaaagggacaaggtagctggagagaataaaatgaaagcattcatttcacaaatgaagatagccaggtgcgtggaacctttgccattcagtataagaaaattgaaatcctgctttcaaaatacatttttgttaacaccaaatctctaccacagtctccaagcaccccctaaccaccaagggatacccccacttttctacaccttaaaaaagaagaggagaattttaggaagctggctgatccggatcttggatatctggctgtcaaagtctttatttggggtccaggaaaaggaagtaagaaaacgcacattgtgctctgggatttataaagagattcgagtgttgcttatgtttattttattattaaagcccctgtgatcttcatctccattttgtatgcacaatcttttcacagatcgacttgtgacttattgatataggaaagcattcccacattaacccaaagtagagacacacacacacgcacacacacgcacgtctggaatgagagaaacacaatcacacaggacgcgttcctgtcaggttaatttcagccagtgcctttttcaatcatttattgtaaaatcttgcctgcttttattgatgtttctccctgattatgtggagctgcaagaatgaggaaatattttaaatgaaaaataaatttaagacgtacaaacatcagataatatcacataccaacctcactattagtgaaattgaaagaatatataaataatgcaaaaaaaaatcagcaagggagtttagtaatggaaaattcccctgcaattaaatgaaacagtaatttagtgaagatatgcctcaatgaattagcatttattaattggttctcataaaaacaatttgtgtgtgtgacttggggagggagatgtttaaagtatatattgtccatagataaagttcctcaaatattcatatcaaattatgtcgttatcacattctattttgtgagaaatcccaagtctttcactggcaagttacacctgtacacagagagcttgaatgcaaaggaaaggattcccatctagatccgaaagagtaaagctggttcccacttctcttggtacatttccaaatgtgaaacgaatgagggacacactggcagagtcttctatgcttaggaacatccaaaccgggccgcaagaagtctccctgaggacccagctcttctggggcacagctagctaagccagagctaagccagggctggtttgtggttctggtcccccagcctgctccagcatcctctccagctcaggcaggaactgcagtttgtaatctcagcgaggagcttgctagggttgactggtgcatggatgtgtttactttctctcgccacagttggtctgtcttcagttctaagcattttaaagctgctctatttatcagtccaagaagtgctgagttctccgttgagctgagaagctttgagctctatggttctgagtacacgagaagccagaagataaaagaaactgtttcatttaagaaaaaaaatgttttaaaaagtgggggcaggggaatgaatgagcccaccttcaagactgcagattagttttgcttttgttttagttgaaaacttggtgcactgccccacttcgggtcctcattctcttcagagatagaatttagtattgaaaaacaccctctaagagaggagaatatgccctcacgttatcttctcttagagggtgtagagttctttgcgggagggattctttccaaatgcagattggaacaccttcacccaggttcttctggggagggagctaacacattctgcctaggaaatgcaggcaatgactactttcagcaggagttctagacattccttttgtggggaaggagtacagagcatgacaatccaggagtctcttggctcctgaaaactccactctgccacaccaatcctagttcatccagtcagtggtcagtgaccctgggatggatggaatctctgcagtgaggtggagtaggaagaagcatccgctcttctttgtttatctacagtaatgacacttttaaatggatcttgaagattcataattatttccttaggtccagagttagggctgacaagactgtttgggttgctgaaagcccccctagaccccttccttggccagatagaaatacaatgagcaaatttctcttatataagccactggccagaaaaatattcataggaaggcgtctgtcttaaacctgtaattcatgtaactgagtctgggctttaccttgcttggctggtgggggtccttccccaggaatgagtctcgatagaaaccagcatctctttactgaggcatgtctaagatcaaggggaagaaagtccaagagtccccgaaggatacttggattctgtttctgtgtttcttcccgaggaccctccatagtcctgagtgccatataagatgccagcaatccctatgggtcaggcaagccagcctcacagctcctcctgctctgcccatgtcacatttacatccaaagaaaaagaatgtctgcacaagagctgagcatacctggcacttagtgagctgtcaatgaatggaagctgtgattcttctctctgaggactgccacaggtgtggtgtggtgctgagagcagatgtattcatcatctcatttaattctcacaactctgccaggcaggtattgctacgacatttttatagaagagaggggaaggaactggtgttcaaagaggttgatatgactccaattcccctttccactgctccctacctcaaggcacccaaagtccagctcatcagaactcggctactagatgatcgacacctggaatcctagtggaaactcccnnnnnnnnnnnnnnnnnnnnnnnnnnnnnnnnnnnnnnnnnnnnnnnnnnnnnnnnnnnnnnnnnnnnnnnnnnnnnnnnnnnnnnnnnnnnnnnnnnnnnnnnnnnnnnnnnnnnnnnnnnnnnnnnnnnnnnnnnnnnnnnnnnnnnnnnnnnnnnnnnnnnnnnnnnnnnnnnnnnnnnnnnnnnnnnnnnnnnnnnnnnnnnnnnnnnnnnnnnnnnnnnnnnnnnnnnnnnnnnnnnnnnnnnnnnnnnnnnnnnnnnnnnnnnnnnnnnnnnnnnnnnnnnnnnnnnnnnnnnnnnnnnnnnnnnnnnnnnnnnnnnnnnnnnnnnnnnnnnnnnnnnnnnnnnnnnnnnnnnnnnnnnnnnnnnnnnnnnnnnnnnnnnnnnnnnnnnnnnnnnnnnnnnnnnnnnnnnnnnnnnnnnnnnnnnnnnnnnnnnnnnnnnnnnnnnnnnnnnnnnnnnnnnnnnnnnnnnnnnnnnnnnnnnnnnnnnnnnnnnnnnnnnnnnnnnnnnnnnnnnnnnnnnnnnnnnnnnnnnnnnnnnnnnnnnnnnnnnnnnnnnnnnnnnnnnnnnnnnnnnnnnnnnnnnnnnnnnnnnnnnnnnnnnnnnnnnnnnnnnnnnnnnnnnnnnnnnnnnnnnnnnnnnnnnnnnnnnnnnnnnnnnnnnnnnnnnnnnnnnnnnnnnnnnnnnnnnnnnnnnnnnnnnnnnnnnnnnnnnnnnnnnnnnnnnnnnnnnnnnnnnnnnnnnnnnnnnnnnnnnnnnnnnnnnnnnnnnnnnnnnnnnnnnnnnnnnnnnnnnnnnnnnnnnnnnnnaaaccctggttgacatttaaaagtctctgtgattagctgagcaccaaatctctgacttaagctttgctttgctcctttgcttcaacactgagcaaggtagaaggcacctctacagggcagggagctggagtcttgctcttccctttcaagaaggcagacccgcagaaccaggaagaagaatgatcagacaaaacaactcagtggtaggaaaaggaccgaacactaacaacccattcggcaggagcaccaaagttcatttatcttgaacagtcaccccagcacgactatgttgtggctgttgacaggtaaaccccatctggctttctcgagtctgctcctcattgttccagagctggtgtgctccatgacggtctacactggggctccatctcagggctgctgggcagtttgtggcaaaatgtggcagggctgcaggtagaagtgccgtggagacacttctgccaaatgaaaatggttactggacacttccaatgcctaggctccatgccttcacagatatgcaaactttcccctctgtaggccttacatctctttggcagtatgaaaagacctgggtccttcgagccttggggaccttcctggaccccccatattccctggggacatggcagtaccccataccaggaaggtccccatggcccatggcccaccccgactgctggccatggggctgtctagacaggtgccccacactgtgacaggcctgcctgggcctcagggctcccccttttgcaggtggcacctgctttcaagggtcctgcttacagggacatagctgctgtcctgagactctcctttcctcagggcctggctgggggccatgccatgtctgcaaagcacttggtcacgtgctgcccacattccagctgtcctcacccatcccagctccaaagccacctccccatgaagctgtccatgattcctcttcctcttccccacctccccaaggtctcctagcactctgtttgtatggcatgccttgcagtccaatttttggagaaggcttgatctctgtggctcgcagcttccagacttaagttacttgagtacctgggacaatgtatgcctcacacatctcagaagcttcataggctttcattatgctggtctacctggatccagagttgttcaaggctagagggggctcacagatgagattctgtcgccacatcttaccagtgaggaaactgagacccagagannnnnnnnnnnnnnnnnnnnnnnnnnnnnnnnnnnnnnnnnnnnnnnnnnnnnnnnnnnnnnnnnnnnnnnnnnnnnnnnnnnnnnnnnnnnnnnnnnnnnnnnnnnnnnnnnnnnnnnnnnnnnnnnnnnnnnnnnnnnnnnnnnnnnnnnnnnnnnnnnnnnnnnnnnnnnnnnnnnnnnnnnnnnnnnnnnnnnnnnnnnnnnnnnnnnnnnnnnnnnnnnnnnnnnnnnnnnnnnnnnnnnnnnnnnnnnnnnnnnnnnnnnnnnnnnnnnnnnnnnnnnnnnnnnnnnnnnnnnnnnnnnnnnnnnnnnnnnnnnnnnnnnnnnnnnnnnnnnnnnnnnnnnnnnnnnnnnnnnnnnnnnnnnnnnnnnnnnnnnnnnnnnnnnnnnnnnnnnnnnnnnnnnnnnnnnnnnnnnnnnnnnnnnnnnnnnnnnnnnnnnnnnnnnnnnnnnnnnnnnnnnnnnnnnnnnnnnnnnnnnnnnnnnnnnnnnnnnnnnnnnnnnnnnnnnnnnnnnnnnnnnnnnnnnnnnnnnnnnnnnnnnnnnnnnnnnnnnnnnnnnnnnnnnnnnnnnnnnnnnnnnnnnnnnnnnnnnnnnnnnnnnnnnnnnnnnnnnnnnnnnnnnnnnnnnnnnnnnnnnnnnnnnnnnnnnnnnnnnnnnnnnnnnnnnnnngattaaggctagagggggttacggatgagaatgctatcgccacatctaaccatgaagaagctgagacccagagaggtatgcccccgaccctggtcccacagcccttgtggcaaagcagacactccatctcatcaccaggacacttttcatgacccctgtggtgacttccagggcatgtttgagttagagtaaggactgacccaacccagggagcctttgctgtggcctctgctgcataagcaggacccaaggaaatgaaggggcctccttcgcctgctgacagggactgggaagcccagtgacagctgctgagacatacagacacacacccatgcacactcacatgcatgcacacacatacacagcatatgtacaacactcacatccaaacatacagacaaccagggggattagggtgaagcaggaaggcactcaaggtgcaaaattccaggaggctctctctccatgtggtggattcaggtagggttggccctgagagcaagttcctctataaatcttatagcctggacacctggctgtcctcattctagtcccctgtatcctttagacacacacagtcatatccagttacacacacagaccacagtactcacagacatatacatgcacacatgaatacaatattccccatctcacacacataaacatactaaaagtaagcctttaaaatgtagaagtatgtgcagaagactgtcctaggtctgtgggtaatttaaaaagaccagagaaggccctgctgtcagagaccctgagaaatgcagctgggaagttacaggtgtgattgatgagtcccggctgtactcacagttgctagaaaggaagtcataatcgatgcactggggaaagtagggtgtaagctatccaggaatctgctctgtgctgtgcatctatttaggcatgaggtcactgacatgtgacctccctgttcttgcaacctgtggtgtaaggtctgagtagaggaataccagtgtccaaccctgagcccctcctggccactagcccctcactgaagtgacgggtcatgggtagtcatggagccctgtagagaccttttggtccagcattcttgttttcacataagatccaggggcagccagtcatttgcctgcatcagcccctagcaccactaggtctctggggttcacagtggctcttccctgatgaggacagagctaccaagtgggcagcagcagtagcggcaggaactggcctcaaggtcccccaagaatgaagcactgaaggcaggtggctgccagctagcatgggcaggcctctctgctcagctcaggatattctctctaacattctgtccttgctcagaattcctgggccactctgcgcctgagacccctcagccccaggcagttcaggcatgctctgtctactacactctaaaggagaagtgtgaacacaaaccacagttgcatgcacaacaccgagcttgtttctccacccacatggactgtatttgtcactattatacacaatatggtgccatcatgcatattttgtacatttgatcagccaatatttatataaaactttcataaacactttcaaacagttttaccccatagggtgggcagaggtgcttgtcaatataataaaactgaacaacagtggtagaaaaaggtacacttgtacttatcttcaagtttaagatgtaaattttttctgttcaatggccactacctcatattatttttaggatctgggatcggacttagcaacacattatgactttcaagaagttgagctcactgttttgtggcgttctttgcagaacaccgtgaacttccgggtgccccatgtgctgacaagtgtcagaacagctggtgtccagctgacgtgaggctggacttgtgtgataggcacgttgtggccatagctccccactctgtgaaatgatgaggtcgacatgcctccatccatcagtaggatccccagcatggagaatttacaccatcacccttcaaagaaaggagccaagccctgggcacctcctctcaccttgactttcctacaaaacacccttctttcttggcaccagtatagcacatgtgtgttggtcatttaggagcccaggtgccttgtggcagagtaaagacacacacagaaaggctggtcttttcttactcagcatccctggagcacacccggaacatgatgccttccttgagatttcctttaaagaccctgtcacccctgaggtttccatcccagctacctacagaagtcgtgatttcttttgtctttctctcagcttcacagacttcttggtccaccatggggagggcttctattcccagtcatccactgtcctgtggtgaacctctctcctctcctcctggcccatttctctcccaagtgtgtgctcagtctgcaccatgtggccagatcatcttaggttttgatccagctcctaaagaagcactcactgccccttcactctctcactctgacttcccagcacttgggttctttcccagcactgcctctgcgtctggagtgctccatgcaaatttctcaccccaactgctggcatgctcagttacctttagtttttatgatgtgtcctcacccatcccctggccacacaaggctcaagatctaactccaaattatttcaaagagcattattactcaactattcaatttagtaagtcaatgtctactgagcccctcagtgtggcaggcagggagttaggctttggggttatggaactcaggagaccatccctctgccttcatgctgacattctagagagaggaaagcaaactgaactttcaccacaatcacagagagaaagcaaaggcttcagtctagatagacagaaaatgctgagcaagtaggagagggaggcatgctgagctctgaccgggtcaggatgggattccttaaggtggctcagaggagaaaccagccccagcagagatgcagagtcccaggagggtgtgcaggttccaggcaccagcagtcagccctgaggggaggagacagcaatgggaacatggtcagggttcagcccaactgcaggggttgacaagagaagctaagctatggtgttaattccaacgtgccatcagaacgtctgagtaaagtgcactcgatgtatacgttttagggcattttattcacttgtgcacgaaacttccatcctcccctggcttggcctcacgcttctgttgttggcagttttcatatccttcttggctcttttgccgcagctgcatacctactgacgctgttgtcttcaggttttgcggtgattttattaagtggaaaagccatggcaataatctgtgatagctaggttattcactttttcaaaatgttctggtttctctcctctcttggctctgtttcagacaaacttagcctggtgattttccaaaataatcagatttctccttgcacttccttttaatccaatcattaacaagccattttcaggcaaactgctgatgtacaatccgaggagactttctcctacctctgtggcctatttcccactatttccgtatgcaaacccatgttccagccagctagtcattgtttccaaaatacaccatgtacattctcacctctgtgtctctgcccattcaatgcagctacctggaacacccttcccactcccactcccttgacaaagcctcagtcaagctccacctccttcccgagacctttttagacactccctacctttagtgaccatcctgtctgacttcccactgcacctgctccactccctgggtactcagtacctgttccaacaaatgtcacttagcttcttacagtgacaacctgtctctgagctagaaaagaataagaacccttccagatctctctctatccccagcaccttacacaaaatcctacataaggagtgaggactctacaaatgtctgggctgctggttttcacctaattctccaataacattttttattgcttccttggttgatgcaacttgcacatttgagttttgtataagaagtttttccaacatgaaatacacctgatcctttcccatgatattgctatattacttttctattttctttataataattggcaatgagggaactgagaaagcaagaaatgcagcctttgagggaacctgatgcagccattcaggccggagctgccccactgggatacctgcctggtcctagaggcatcttgtaggcacagaagcctatgcttgaaggccagatagccaggttgagcagcaatgggcactgggagtaaaaaacactggcaagcctggggagttctgaaccaacaagggaccttcctagtggatgctgggtgtcgacttggcggggtaattggtcagatttagggtgagagcatctgtgaggataaaagattacaagattcctgtaattcctgcagactgggaatacaactccaaacaatatctagcacatagtagacatatactaggtgcttcacaagtatttgtaaaatggatctttcttttcttcttttttcctctccttcttccttacttccttttttcttcttcttctttcttggctttagataactgtttctcaagtgtggtctatatcaaaacctcctgggatttttgttagcaaatatggagccctggaatctgtatccttcacaagctcccagggacttttttatgatcagcatttaagaaacactgatctacagcccacccacagtctccccatgcggagtccctcatgcctgcctgctgggggcacacccttctttttgcactgtgcctcctcctcccagagatctcccatctggctatgggtagaagcagatcagatttgaatgcagtctcaggtctgcccctaactggctgtgcacatgccatttgagcctccgagatggcatctttatctataaaatggggcaaagtgccagccccacctacctcatgggattgttgtgaaaaccaatcctggatgcaaccaagtccaacaactggtgtttgttgaactaaatttaagaatcacttacttgacagtactttggaagggccctgtggatgtcaggtgagtttataaccaacatttagactggatccagggtcagaaagttcttgaaaggaggagaagcctggaggttctggtaattggagggaatccagcctggcatttggaatatttgctgtgctgatacactgatgttctttcactgaaaaaaaaaaaaaaaaacattgcaacatgatgcaaggatcacaaatggagaacaagatgatgaacaagatggtagcaagtatagtaatgtcaagagaaacaggttttcaccaaaagagggtaagctattagaaaggattttaccctctacttgactgactgaacctgccttacacttaagagtcatttggagggaactggaggggcagccagttaccctaggagagcagcctccaggggctgcccgagcctgctgtgtgaaattcagggctaaagctctaaaactctattgatccgtgcatgcgtttgctagcgctgcagtgacaaagtactacaaactggagggcttaaataatagaaatttattgtttcacagttctggaagccaaaagtgtcaaatcaaggggtcagaagagttgtttccttctgaggctggaggagaatctgttctgtgcctctctcgtagctcctggtggtttgctagaagtctttggcattccttggcttgtgacagcataactctgatattcatatggctttctcactttatctctgtatccaaatctccccttttcacaaggacttgatcatattggattaggcccaccctaatgacctcaccttaactagatcatctgcaaagaccttgtttccaaggtgctagggtggtgggtggagacaggggaggggactattcaattcataacacctaagtattgtgtgtccttagtccgtttcagtccccacccagccctgacttgactctcagctgctttgggtctgagcaacaccactgcagaagctctgatttggagctgacagaaaaagaaggggaaggtgacatccatcctccagaacccttcctattgctccaacagagaaggggactccccctcccaagccagaatccccccaaagagagcctgaagtccaggttcaacacttagaaaaggcgagtcatggtggctcacacctgtaatcccagcactttgggaggctgaggccagaagattgcttgagcccaggagttcaagaccagcctgagcatcatagcaaaatcacctctctacaaaaaataaaaaacacttaagaaaacaaaaaggataagcaaacaagctgatacaagaacctaaaatcggccgggcacagtggctcatgcctgtaattctaacactttgggaggccgaggcaggtggatcacctgaggttgggagttcgagactagcttggccaacatgacgaaaccctgtctgtactaaaaatacaaaaattagctgggcatggtggtgggcggctataatcccagctgcttgggaagctgaggcaggagaattgcttgaacccgggcggggcggaggttgcagggtttcagtgagccaagatcgcaccacttcactccagcctgagtgaaagagtgaaactctgtctaaaaaaaaaaacctaaaatctttcagggcatgccttgcttcaggacatgttctgtgcaaacctcactttcttcctccactctaccaacatggccccagccaagaagccactaagctcccaaagggctaagacagggatttaggtcagaacgctgaggttctttcttggttctgccatgaggtgaatctgtgacattagacagctcacctctccttcctggtcaaggatcctctcagaagtgtgccttgcaactctgccactccatagacactgtgcacatccaccttcatagtctgtaagccgtggcagcccactttgtcaccatgcaagtcatgtggcagcccataggccccactgtgtgctaccttccctcatcttacggcacgcccagtgtcaccactggtgttttgtcacataggaaggttactcaatgtttccctctagagctctctctgtaccagcttctgggggtttctggcctctgttccccggctgagggcagtcccagagttgtagacattaggactggaagcatcatctgcttctgtcaagccagatgaaaaaactgaggcacagactggcatcgccacagagtgggcagaacctaggcctcctaattctcagcaccccctgtttcctctccagaaactgcagcctgcaggctgcatctgctggcctctgtcccttccccttttcttctgccgcagtgagggcagcttttagagtggataatctccttcgccatggtgcctgctatcgacaggtgtggaaacaacagatgcacggttttgtcacagactttgctcctgtgtgtcgctcaaaaaggcggttccccttcatttgttcttacctgttatggtccccaggatggccaggccctccttctgtcccccaccctgaagactctgcaactcacacacacagtcacacacatacacacacacacacacaaaacagtcacactctctctctttgcactgctctacccactgcaaagcacgcctgcatggtcagatgaaagctgcacctcccctcaaggagccaggcgtctgcggaaagaacttgacaacgagattcaaagagaggacaggggctggggaggtcggtgggaggatggagaaggttctggaaggttgcttctgggaggcttctctccctgggcttctgaaggccagagtgcagggtgtggattagccatacccaaagccacattcacagagggggaagcatcactcctgcaggaaggaaaggaagtgagtcccctgcttgggaaatggtgcccaatctcagagggagaaagtggctcatctgctgttactttatataccttatattgctgatataatttataggatctaagacagcatgaagagacctccagaaatctctgagacagcaccaaaggcaaccctacccagggaacccttggacttggtgactttcaggctcagagcagcccatgtgtgtctcacttgcctcaagctctctggcccctgtgctcccaaggtctccagcttggctccaggaaaaggcagggcctcatgtcaagtagtacttttcttaaggagcttagaggtctattgacatttgaagcagctccatccctaaaaatccacacactgaagcccttcttgggagggaggtgacagggttaatctaagggctgggggaggcggagaaaggccttgaaaccacacagtgaagccaaccagattaatagaggaagagagaggggggtagaccattaggaagacaaagagaaaatcatgctggagcaatagaaagggaaatctaatatcaactagggaaaaataaatggagattagggcaaacaaattagctttaatgggttcaatgctaatacaagaataacagcggagctgcgaatgcctttgaggggaagatgggataaagaacctgagcagtcatgcaagcaataaagattatgcagggaagggggatggccaaaagagccagcagggagggagagagaagggaagactccgggcagatgggtaggggagcggtggcattggaggagtctgccatctttgacaggaaaggactggaacagagagctggtaagaactggagaggcagcaatcaggagggaaataaaagaaagcaaggaaactgggagacactgagggcaaggatgcaaacccagagccggaaagactgggaagaaaggaggcagcgatggatgtaaacaaagagaatggaagacaaccagccagtacacaagagtggagggaaataaaggaattaggtgcccgctctgactggagaaaatttaaaaaggaaaaattaggccccaagaaaatgaaaagctggagaggatttggaagtgtgttttggaaagcacccatacttggtaggtgacgaaaggacatattcgctcttagggcggggtctggctattcctggaatacagtgctgctgccaggggtggtgccggaggtgggtgggcaaaagtaagcagtgcacagcattcactatggcatctgagagctctcagcttgagtctcagtaatgccactttgtaaaggtggagccttgaacctgttacatgccgaatctgttcctcatcttctcatctataaaatgataatgtacttcatttttcaaagggttattataagaattaattgaaaagatgcatttaaaatactcagcttggcccaaaaataagcacctcccataatactggctataactattattcttaggcatcgactaatggggaagaggggctgggtactaaagacagctcttcctccctccttcccccacttcctcttcttttaggtccagcattggtgaaatacgagcctagtttgattctctcccagacagagtctaatccaagggaaacctctttatccatcctctatctccctcccctgtccctccccagctccctctcactattggggatgaaataataatgctaagccttccaccacagccaccctctgggctgatctaaggcagaagcatctaaggaagccaaatatcacattctattggaagaccctcttatatctgcctgagcctcagagtgtagtagacaaggagctggagttggtcctcatggcctcacatcttaggatcctcctgggatgcattaaagagcatagacaccccaccagggaaacagagccccaaagaccagcacacagcaacaataacaagctaggagtcaatcggttacagcctagtcatgggcactagaaggggaaagaaggagctgggattatttcctacccctccaggcatcccagaaccctgcccttttatcattactaaggattttagaagaaagagaagagaaatcaatccaggcaagaagaggggcagataggggtgggggagctttgccatttgctaataaataagttaattaacttgaaatcattacaaaaagaatcttcccataaaaccataacctccaagagggcagagacccatctttcttcatccccctatgtccccagaacctggaacagtgcctggtatggaaatggtgggtctcagtggtgagggtaatggctaacatttgtggacggtctactgaagcccaggtcctgtgtcaggtgctgcacctgcaccatgttatttagatcacttggcacacttagaaggaaagacagaaagaagtgacagaaattcatgccaaagtaataagttagtcagaggtgaagcaggggtttctgactctctcctccatatagctttaaggaatggaaataaatgaatacatgaacctcacccactcatcagggtaagaggacagatttgaaagctacctatcagtttgggtgttattctatatatatatacacacacacacacacacacatatatatacacacatatatatattccatatatggaatatgtatctatatatagaataatagaatatatgagggactgataaatgggccacctggcaagtagtagaagtttaaaggatagtggaaggactttcttcttgttgttgtatgtggctcttgtcagccaatacctcagcagcagtagttgaatcagattccagctctcagctctcccagagccagcctcacatgcccccagcaatagctgggatgagccagcccttcggagatccaatccccagctccacaggctcttcctctaagcatgtagttctgataactccagtttcttccctttgcttcctccagcctgaggagcagtggttgcttcctgtagctactatctctgggctatttcagtgtttcctttgtgctcttacagccctccaacaccagacaacaattccccatattaaagcccctttgttgaaatacctaggaaggtttctgtcctctgaccaagccctggctgataccagaagagatctgaggaaaccagattttaagactggattgatcatgtccttggccttgaacacagtactgagctccttgacaatgagaactggagaacttttttcttttttctttttacttatttattttttttactgattgatccctggcaggcatatgcatgcagcactgcctacacagtcctgagtcaaaaacttctcatggggtctctgagtctggaatgtctgagttctcaggaggggtagcatttgctgctaccctctgcctccctagcttgagctgtctctcgtggttttcccctgatgggatgttaacatcttcccaacagagctaccaacccagtgagggaggagtctgtgtagatcacctcccatcattctccatagagtctctatggcccaggttagaagaaaaagacttcttggctcagactccaaagactagagtcagtgacagtttccttagtggtgtaaaagggcaagagtagcactaatctcacagaagactcctgcagaacacactgccacattcaaccataaagctgctctcaacagtgtgagcctggcaagcactcacgcatttaatgttgacgttgaaggtctgatatgtgagccaacaggaagacctctgcattcatatcctgactccttcggaagcagggcaaacctctttttttttttggactgtggaatctggaccgtcttctttaaataactcatttctatgagtatatgtgtccgtggaaaacagaattctgtttaaggcaaagaaggtgtgggcttcactagacttgtagatctgcctctctccttccctccctccttccctctattcctctgtccctccttccttctttttttccttccttccttctttctgtccttccttccttcctccttcccttccttccttccttcttcccttctttcctttgttctttcctttcaataaccaacaggcacttatattctgcttaatgagattatgtcctggcttatttaaaagaaaggaccaaagagagcaggcagggaaagccagggaagactttctgtaggagggagcttcctgaaccaactcctaaggcatgaatggaaatcaatcgggagaaggtgaggacgggcactccaggcacggaggacacagtcaaggacccaggagaggattcagatgcagcgaaagaatggcaagcaattctgtgctgttagggcatcaggttcaaggctcagacaggtaagaaatgaggcttgaacactaagtcagggtcaggtagtggtaggcattgtctacaagatttagtagcttggactttgccatgaagaaaatgatgccatgccttgcaaggattcttaaatatgggagtgatatggccagactaggatttagatgtgttgctcccgagctgggtagcaaaggttcccttgagcaaggttggatgtggagaccaatgagtccaggtgagtagttaactcctactcaccttccactcaggttacatgtcatttagagacatcttcctaatcagcttgagctcattttctcttgcacccccaccccattattttttaacaccgcaccctgttgtgttcttcttagcacttattccaaatagtaattatacatttatttctgtatttactttttaaatatatacccatcttcagcctacctatccctagtctgaaagctccatgaagatagaaatcaattctatgtaatcagttctattaaaatgtttgctacatggtaggcatataaaatacatgtagaatggataaatgaatgcaggaatatttgaatgctggggacagacaggaaggtattggttaggtaaatatttaggaggtaaaacgtggtcttgtgagtattccatatgcagagaatggaaaaagataaaggctattagttgattcatgtgacatgtttactgaacacctaatataatttaataatgatcaaaacgaaagaagtcttgccctcatggagctttctatctggtgatagaagacagttatgattcatacatatatagttatgcaaaaaatgtaaaattaaaatttggacctaaagatgcaattaaatttatctatgatacctccccagtccccccaaaattcctcccttgactatgagacattttcttcccctcattttcaaccagattccaaacagcagttatatttgatgctacctttctatgacagccattcaagaaaggtaaagcatgttattagaacacccaaacagaagcctgaacctactctgcaggataaagcaaagccaccgaggaagtgactcagtgctgaaatataaaggatgagcaggagttaactagataagacagggagacaagagctccaggaggagggaacagcatgtgcaagtgccccaaggctggggacacactgttacttccaaggtcgtgcagaagaccgatgacagtgcggtgcagagagtgtggtggcaggtggcaggaggctgagtggaaggggcaggccctgagcttgcatgacagctggtattgttaccaaccaagacaacactagaggaggagcccccttatcacctaagaggaaatctccaatagaaattgaaaacaaaagttgggggaaggacctgacttgggttacctgggatgcccatgatgccatcatgagatgggtagtaggtatgacaataagggtgtgtaggatcaccaaggatggccttgaagggggagagaaacactgagaactaagagaagcctgaagggagaaaacatatgtcatggagcatataagggaagagaaccccattaaagcaaagcaaaaagcctagactgaaggtataaggaatcaggagatgggattgtcactaaaatctcttcaagagggagaacatggcaccctccaaccactcactgtccatccatggccactcatcaccaagcacatgctaagcaggaggcacagagcaggctgagcactgaacgtgaagggaggaatgggctgcaagtatagctgctttttgagaaatttagttgaaaacaataggaaagaagagtatcatggtcaagggaagaattttttttgtttaatgtattttgaggtcaggggctggagaggcaacatagattaatttaattccatctgtaagtttaggggaaggacctggtataaaagaagaggtaagtaatgtttttaaatgggaggataattgacggagtaggattccaggacaggtagaagggcaagagatcaatgagaaacacaagccgcagctctgcctagctgctgtctttccgctccagtttcccttaggaagacaagtgtaaggcacagaggtaaccaagggtcatgcagcaagttgggggtaacagcagatgcaggatgctgctttccagcatgccagcctcttttacccagtccaagggtctcatgtgtccaggtaacccataacctcatgtgtgccggcatgatccagtgtgcagactttggacactgggattccatggccctgggacactttcttcaggagcagttggaggcacagaccctggtctttactccagaaaggcaccaagccaagaggattagctgggaggtggcacatggagatcacagacctgcaagtgagcagctggggaaggcaacaacaccaagctgagaatgccagggactgattcgcatggacaaggcctttcctttgtggaaggcgtataggcctggcatgatttgaaaggcacccaaagaggccactgcacctctcactatagccctgccaaggctcaactatcaccttgacactctatgggactaaagcaaaaagccccagatagttaaatggaaatttttgcagaacaacacattgagccattgccactttaggactgggcagagctgcaaaagataaagcaaaaggataaagaggaaagtactgaagcgtgggatttgggggtcccaccgtgcagaatcatgggaatccatgcaacaatcataaccaatgtaaaccatttttctaccacttgtatataagaaaacactaattacagtagacaaagacagggccctgcctttgagtaactcataaagaaactcaaatagagaaagttactgttcaatgcagtcagtgctatgataggaatttgtgcaaaggactataggaacatgcagaaaggatttccacatcttaagcgtttggatattggcgcatataacaagaattttggtcaataagtgtctctgttttctttctgccatcccaactactcagagctctataaaggatgaagaaattaccaacaaagtcctaagacctccctgaatggtcacttttcaaaaggatatgtttctggacagcaagcttcacctagacctttgctgagctccaatccctttactgtacgataagtcctctctgaccccaggaaagcttgcatttcccgtctgagtacctttcactcaggaacctgcttgcatccggccaggcggtcttgtcttcctcccccatacccaccccgcctccccactcacaatcctccagacatacaaagagtctttgcttatgaggcttcaaacctcttcctgggtcacaccttcccccctcaccccacttcccgcccaaccaggaggctcctactcatttttggcttccggcctcaaagcccaccccacctgcagctgcatgaagaggtggtcagcacagtgggcgccaatcgtccccccaacccctgtgcaggaaggaagtctgcacccacctctgggcatttggtggtgactcacccagaagagtccactcccccacaccggacacaggaaagacaaaagtctttccattgcagagactcagcttaaaacttcaaaccataggggccatctccatctgcagccagcaggctctttccaaattctctttcctgcctgtcctacagccacactaaatgtctttcaatttcttgaaggcaccaagacttagtgcatggatttttttccccctgaagaaaattcttcacctagttacctcctagatactcttccttgcagcttccctctaaccacttacgggtctccccaagcacctggacttatatccttcaagaaagatcaccattaacatggtgattcctaatgtgtcttatatcccccaaaaggttcgaagttccttgaaggccaggattcttgtcttgttcaaggttgtattcccagtgctttgtacctgagtcatgataggcacttggtcaatgtcttgagttgaaaagaaatgaaaaccataatatacaaacaatcattattattgttagaagaatgctggaggagtatgaagagttattctcttatgcttaatttaccagccatcacctggcctaaaccagtggttttcaaagtgtgaccctggcctagcagcattatcaccatgtggaaacttcttagaaacataaattcttagttcaatcccagacctgctgattcagaaacttagggcattgtgctcagtactctgtattttaataaccctcactgccgagtgattctgatgcacactgaagtttgagaaaacactccctagtactagtcctactcccaagattgggtcataacattcaaccatgggaatattacaaattagaaaaatgttacatttatagcaagatttgtttatctaaataaacacttctccatcctggtccccctatcttcttttttttttttttttttttttttttgagatggagtcttgctctgtcacccaggctggagtgcagtggtgtgatcttggctcactgcaagctctgccttgcaggttcatgccattctcctgcctcagcctcctgagtagctgggactacaggcgtctgccaccatgcccggctaattttttgtatttttagtagagatggggtttcaccgtgttagccaggatggtcttgatctcctgacctcgtgatccacccacctcggcctcccaaagtgctgggattacaggcgtgagccaccgcgcccagccccgctatcttcttataggggtttaagtcagcagcaggcataagttttgttaagctccattcgatagataaaaacactaaggttgaaaaaaaaacccactttctcaaatgataagactaaaacaggcagtgtcaaagaagggatcgggcccaagactctttccacagtaacacaaagtcattcagaagacagtcaaataaaataagcaccagagaattcaccgtttaggggccagaaatgtgaatgcatctttcccagcactacaatgcttgctgataacggtaaataacctctcaggaggcttcctgagggtttgggtttctaaggatgcgagtcagtccttcataataattaagagcaatggcccacacaacttacagcgtcgttttttttttttaaaaaaggcacaatacccaattcatgccaccccaaaatggcatttttttaaaaacctgcttcacatttgtagaggtgaagaacctccacctctaagaaaccttgctttcagatatagaggtcccagcctaaacaccgaggtttgggtggatacggcccggaaacttctggaaaatgaggacaaagctggactgctgaaggtcttgtctgtgtttgggtggctgtctggcgcccccttgtgttcagtgcctggacccaaaagagccggaaggcaacaatgatgcagtgagggcaaatggctacagcaattcacaaatggcactctggccagtgaggaccagaggaatgggcttaggactgggcaaaggcccctctgcccaccatctgggctctcctgaaggccctccaagcactcttccagccctagtggagaagcagtcactaggaagacttgcctggcaggcataggtggaagctgtgcccaagctcacccgttgtctccaccaggaagatgggtcattgcatccttcttgctgggtgtttggccagagggcttttcctcctgacttactgccaagggcagaggcttagagcacccccacctccttttttttttttttttttttgacggaattttgctcttgttgcccaggctggagtgcaatgatgcgatctgggatcatcacaacctccacctcccaggttcaagcaattctcctgcctcagcctcccgagtagctgggattacaggcatgtgccaccacgcccaactagtttttttttttttttttttttttgtacttttagtaaagatggggtttcaccatgttggtcaggctggtctcgaactcctgacctcaggtgatccgcccgactcagcctcccaaagtgctgggattacagatgtcagccactgcacctggcccccaccccctttattaaagggaaattgagtgttctgctgaagacagcttgggcccctgaggagacattgcaaggcagttctgaatgtgctaagtcagtgggtgataatgggcactgtgtgcccagcaaaggcacttcccaccctcggccataaacagtctttaactggttcacacagaaggctggggttggctcttccttctcacctgcctgctccctgactcccacactgcagggctctaccttcccagtcatatcaccaaatcctgcccttggtgtgaaaaagaccatggcatgttcagcacaaaacagcagagccaatgacaagcatccaggcatagctctagccccagaacagggctcccctcaaggagcagccctgatctgagccttaaattctggatggatctcagctcctcctcatataagctgagttagacaagtcatataaatcagagcactaaaactctctgagccccagtctcctcatgagaaaaatggaaatctcggccctgaaattaggccagtatggctctaggtactatagagttgaatatgttggaaaatctaacagacaagtatcctcttgcctctgagtctttgcacattctgttcccactgcctggaacagttttctcccctctctccctcacttggctagtacctgtttatcttcagtctcagcttagacctcctcaggaacccttctgtgtttccttgagccaagtcaagttcccctccagtggttcccataactctctgcatgtcaccagtcccaaaagtggtcacaaaatatgttaactggctgtttgctggtctaggacctcactgtaataaaccccatgagggaagaatagggatcatgtctgccttattcaccttggcatcatcagggacctgtgcagtgcgtggcacatagttggcactcaagacaaatggatttgactggatagatgggctcagaatgaaacacaggctggggccagagagcgcaggccaagtcaggaaagcagctaagggaacgtgtacacatatccatgacgtggatagattcccacagtggcctgtagcccctgtgtcagtcctggaacccagtgctatctatgcctgtgaggaccctgcaccaggtccctgctgctctggcctgttagagaaagagggaaccttgggggtcattcaggccagaagtccacagacagagctcaggccttctctgcccaagctctaccagagagtttctgcttttattcttttgtatttgtttttctcaatgaggtagtgttttaaaatctggttccatgaggagaaggagaaaggtgaaaatcacctgcgccgtcattttacaaaaggaaaagagactctcggaagagaaggggttttccccaaggtcaaacggctcagtattggcatgggaagaccccacattctcaactccttacacacttttcagagggagggaagaaaataggggattgtgatttggagtgaagggccgagtctgcctgaagagtccccaagcccaaggtgctcctgtgacaccatcgcatcgtgggggatgagcatcacataccatttgtgccagcatcttgggagtgagatctggggaaggggtgcagaggggcccacagggcctggccgtgggatttcatggtcacagtcaaacacacacacacacaccagcacctgcactcatagctaatccccacccaaactcctacctcaccctgacagctgtccctgggaatattgtctccttaggccatggagggctgaaccaactgggaggggcctttgtgaatggtagacccctgccggaagtggtccgccagcgcattgtagacctggcccaccagggtgtaaggccctgcgacatctctcgccagctccgcgtcagccatggctgcgtcagcaagatccttggcaggtaagcacgaaattcaccgcaggccgccttccccgcagggcttgacttctccagctgatctcagggcagctggagaatacccctcccagggaatggggatttgctcccaatgtccagctttggtcctgagacctgaacagttatggtggtccttctgggcctctacccagccactatttttctactgttttcttgcccttccttctttctttgtccatttatccttcttttactttctccctctcccttcttctcttttgctccatgtctcattagccataggcttctctcctgctaaggcaagagaatcttcccccaagttcctcctcctaccgagacctagggaaattgggccactagggaggggacacacagatgagctcccaaggtctaacccctaaaagagtgatatctgagtttgtgcttctcaaaccataattccccaagaccccagatcagtgcttcatagccctggtagcacattacagtcaccaggggaagcctgatttttaaatagcaatactgtttatgccccagggcagaccaattaaatcagaactttagggaaataggcgcaagttttggcatataactccccagcccatccgcccccagcaagtgactctaattctctgcagccagggttgagaaccactgacccaaagattcagaagagaccaggagcagcaaaggcctgcatctgagctgacgcagtcacagattccagtctgcaaggccacttccattaaaaatgcctctgtgccacagcttccagtcagctctgtgtacgtgtgcctgtccccctgctctgacccttaggtggatttaggaggagccctggttggacaaggcaaagggacctggactgttctttgaaccgtgaaaagccctggctcccctcctgaagtagttagggaaaggcatgatcctttgctgggctagggagaggggattcctgtgatgggttgtggtgtcccagaagagatgagtcctggatggaagtaacagatgaatggagttttaaagagctagattctttttcatgcagatgagagcagagagtttctacaacaagaagaggaggatatgctgacacaggccattgatctgccaaagcaactagttggaggatagagggaggggaagggtggaggccccagaagaggaggctcagcttaacaagttggacctggctggggatccaagcaaggtcaggattccagagtccatgaggagaagcttcaacttgaacctgctaaaacctgatagaaaaccagtgaccaggggggtgagggatatgcctcaggcttggacagggcagggagcaaaggtgaaccagcaagacagagcagagggtccagtgacctcggctagctttctaggtggccaaagaaaatagtcagtcattggctgggcatggtggctgatgcctgtaatcccagcactttgggaggccaaggtgggcggatcacttgaggtcaggggctcaagaccagccaggccaactgagtgaaacctgtctctactaaaaatacaaaaattagccgggtgtggtggcaggcgcttgtaatcccagctactcgggaggctgaggcaggagaatcgcttgaacctgggaggcagagtttgaagtgagccaagcttgtcccattgcattccagcctgggtgacagattgagaccctgtctcaaaaaacaaaaaaacaaaaacaaaaaaaaaaactcagtcgtgctttagccaaaagaagctggatagagcaaactgctgtgcccttgtcattcacacatcaggcacaccaagatttcctttcttagaaggggaatcttttgtgccccatacaatggctgttgcaggtgctaggacacaagagactggccagagggaaggaagagagagaagccaaggtgaggcctttagcagagggtgctggtttggcagtagcatgaacctacccaagtgagggaaacagatagttccatgcacatcaagcgcttgagaccagccttggaggcaatttcactctcatacccctacccagaagcctcagagaggagggaggctctggcttaatccctgtctaaagaccccacctgcttattgggtaattctttgggattctctattggagtaggtactacgagactggcagcatccggcctggagtgatagggggctccaagcccaaggtggccacccccaaggtggtggagaagattggggactacaaacgccagaaccctaccatgtttgcctgggagatccgagaccggctcctggctgagggcgtctgtgacaatgacactgtgcccagtgtcagctccattaataggtaagagagaaagcagcctctggtgtcaggctggggcccctgggctttggggaaatcaggaaagagacaagaaaggcctggcttgggtggagcagaggccgggaaggggcctgatgctgaacaatcaggcagggagcacacctggctccaggcagatatcatacctccctgcctcctcccttgccccatgctatggggcaccctccccctggcccccagccatagtgtgctatctacagtttccttcctcaaacaccacatctgctttcattcaataaaagaatcttcatgaattgatccttttataagccatcagacccctaacccagcccacattcaagcattcattcgtttagtccctcaatgattcactcactgcctcaatcaatcatttacttactcactcgcttgttcattaattcattcacacataattcattcattcattttgtgctaggccctgggacacacaaagcccatctttgtggagcttacagtctaatgagaacacagatattaatcaactacctacaaaaaatattgtaaaaatgcagctgtaagtcctgctaagaaaaggaacatgaagatatgcaaggtagcacaggattatttggtttatgaagttcatgaaagtcttcccctgagtaaaaaacaataagagaactaggtgaaaagagctcagacagttatgtaaaggccctgtggctaatatgatcaaaagaaaaccagtagataggccaggtgcagtggctcatgcctgtaatcccagcactttgggaggccaaggcaggtggatcacctgagatcaggcgttcgagaccaacctggccaacatggtgaaaccctatctcttctaaaaatgcaaaaattaactgggtgtggtggcgagtgcctgtaatcctagctacttgggagactgaagcaggaaaatcacttgaacatgggaggcagaggttgcagtgagctgagatcacgccactggactccagcctgggcgacaagagcgagactctatctcaaaaaaaaaagaaagaaagaaaagaaaaccagcagataaagagcaggggagcacaaggtaggctgaagttgaagatatcagcagaggtgacctttcagaggctgggggctgtgttataccttcttgcctttgnnnnnnnnnnnnnnnnnnnnnnnnnnnnnnnnnnnnnnnnnnnnnnnnnnnnnnnnnnnnnnnnnnnnnnnnnnnnnnnnnnnnnnnnnnnnnnnnnnnnnnnnnnnnnnnnnnnnnnnnnnnnnnnnnnnnnnnnnnnnnnnnnnnnnnnnnnnnnnnnnnnnnnnnnnnnnnnnnnnnnnnnnnnnnnnnnnnnnnnnnnnnnnnnnnnnnnnnnnnnnnnnnnnnnnnnnnnnnnnnnnnnnnnnnnnnnnnnnnnnnnnnnnnnnnnnnnnnnnnnnnnnnnnnnnnnnnnnnnnnnnnnnnnnnnnnnnnnnnnnnnnnnnnnnnnnnnnnnnnnnnnnnnnnnnnnnnnnnnnnnnnnnnnnnnnnnnnnnnnnnnnnnnnnnnnnnnnnnnnnnnnnnnnnnnnnnnnnnnnnnnnnnnnnnnnnnnnnnnnnnnnnnnnnnnnnnnnnnnnnnnnnnnnnnnnnnnnnnnnnnnnnnnnnnnnnnnnnnnnnnnnnnnnnnnnnnnnnnnnnnnnnnnnnnnnnnnnnnnnnnnnnnnnnnnnnnnnnnnnnnnnnnnnnnnnnnnnnnnnnnnnnnnnnnnnnnnnnnnnnnnnnnnnnnnnnnnnnnnnnnnnnnnnnnnnnnnnnnnnnnnnnnnnnnnnnnnnnnnnnnnnnnnnnnnnnnnnnnnnnnnnnnnnnnnnnnnnnnnnnnnnnnnnnnnnnnnnnnnnnnnnnnnnnnnnnnnnnnnnnnnnnnnnnnnnnnnnnnnnnnnnnnnnnnnnnnnnnnnnnnnnnnnnnnnnnnnnnnnnnnnnnnnnnnnnnnnnnnnnnnnnnnnnnnnnnnnnnnnnnnnnnnnnnnnnnnnnnnnnnnnnnnnnnnnnnnnnnnnnnnnnnnnnnnnnnnnnnnnnnnnnnnnnnnnnnnnnnnnnnnnnnnnnnnnnnnnnnnnnnnnnnnnnnnnnnnnnnnnnnnnnnnnnnnnnnnnnnnnnnnnnnnnnnnnnnnnnnnnnnnnnnnnnnnnnnnnnnnnnnnnnnnnnnnnnnnnnnnnnnnnnnnnnnnnnnnnnnnnnnnnnnnnnnnnnnnnnnnnnnnnnnnnnnnnnnnnnnnnnnnnnnngtcccctaaagctttcttccttcccggggggtacatgtgatcaggatagctgacgactaagcattgactcatagattcagcagcagcggaccccgaaagcaccttcacacggatgccttaatgcaggaccagctcgagccgctcgagtgcccatttgagcggcagcactacccggaggcctatgcctcccccagccacaccaaaggcgagcaggtgagaagctgggccctgggaggtgaacagggtgggcaagggccagagaaggtctattctccaaatgagcctgtgctccatcaaagcagctggaagttgcatcaatgggctcagggcacctgccttatgcaactccaagcctgacacatgctttattttaccagatgccctggcatcttcctctctttctaaccctcctggcttccttcgcccaaaacctttgagcctggccctttcagggatggcagcacaacctgatgatgctatcccttgccatcagcgtctttcccagattgcaacatcacgttccacaactctgaagcagtagcacaaagccttcacatcatgaccgcagccactatttcctagccccacctttggccacgcatcctgcacaccccacgctcttgcattactcatggctccaagcacaccaccctcgctcacacctctctgcccttgcacaccgtgtgccctccacacagaatgcctttcctcccacttctctgcatggaaaaataccactagccttcatgactcagctcaaacatcaccctctccgtcagtcctcccctgcccctccgacatgaatcatctctcctgcctcttgcccttctgcatgtcccacatgctgctctcagtagcttctcacagtgtcacttaataatctagcagacaggcaggtacaaagacacgcggactccttaaggacagggaagcctcatgaaacattaaacatcgtttttattcccagcacctaccattgtgccccccttataatagacagtaatggtatagtgaatgaatgaacaaatgaatgagttgagaaatccagaataatacatcacaagctacagcgaatttttcttgctagtgctcaggacaggtgaaatgaatcataacaggttggtgtctgtgaaaagctgacagagatgtgagaggtcccaccccgaggccaacaaagactctgcagctctggcagaaccactaagctctcagctcctagtcatcacatctttttcccttaaccctgcccaagtcaaccagatgaggagtgtcttcagggtgggtctgttgcccctctttgcccatgccgtcatttgctgtaggagtgaggcaagcccatatgcctttaagaactgagtaggacaatggagatgatgccaataatcagcccaaccacttccagtgaccgtctgggctgctggtcccatgccagcactcgcagctgggcaggcaatttgcatcagcaattttatcagcgttgactgtggcaaccacgagcgtgcagagaaagctgaccatcagcagcatggggagagggcctgggtgctcacgcaccagtcagcacacagctccaggaaggaaaggggttgcagtggggggcctgcaggaagctcactctgtgagagtaagcctacaaaactcagtgcgcaggcaccagccactcagtgaaagtaaagaaaccctgctgatgagactctggacacccgctgagtcccagagccatttcctggctccatccctaagccccccaaaggaccctgcttgactacagagcacccccatgccatgctggcatatgaacatggggaatcctggaatgagagagtctttgagctttcggggacctccatgaccaccttgtccagtttctccatttgtgtggagataatccaagcaagacaaggagggcttgggcaatcagaaggttttggagctcaggcctgccaaccctcatttcattcagactggtccactgtcacctgtttcagatatggtgcttctacgtaaacacttatttgaagactgaaaaaaaaagcatttgaaaaccattaaacttctccaaccactcatctttcagatgaggagactgaggtccagcagtgtccataaattattcattacctcctcagtcaatcattattcacccagtcattcacctggagggtggtgaaggcagggagaaccagccagtgcaagggcccttcatgtcctgcctggcctttgcttttcctacctctggtaactgactgtgctgccaaagtaacactccgtgctctctcacctgggcataggaatgccctctggcttggggagccaagaaagaagcacaagtattcatacctgaccttaggacaggttgtaacacagctatcttttctgcaaaatcaacaagtgggggaccaggcatggtggctcacacctgtagtcccagcactttgggaggccaaggtggacgggtcacctgaggtcaggagtttgagaccagcctggccaacatggcaaaatcccatctctactaaaaatataaaaattagccaggcctggtggcgtgcacctgtaatcctagctactcgagaggctgagacaggagaatcgcttgaacctggggggcggaggttgcagtgacccgagattgtgccactgcactccagcctgggtgacagagcgaggctccatctgatacaaaaaaaaagccattgcgaagtgttcatcagagacatcatnnnnnnnnnnnnnnnnnnnnnnnnnnnnnnnnnnnnnnnnnnnnnnnnnnnnnnnnnnnnnnnnnnnnnnnnnnnnnnnnnnnnnnnnnnnnnnnnnnnnnnnnnnnnnnnnnnnnnnnnnnnnnnnnnnnnnnnnnnnnnnnnnnnnnnnnnnnnnnnnnnnnnnnnnnnnnnnnnnnnnnnnnnnnnnnnnnnnnnnnnnnnnnnnnnnnnnnnnnnnnnnnnnnnnnnnnnnnnnnnnnnnnnnnnnnnnnnnnnnnnnnnnnnnnnnnnnnnnnnnnnnnnnnnnnnnnnnnnnnnnnnnnnnnnnnnnnnnnnnnnnnnnnnnnnnnnnnnnnnnnnnnnnnnnnnnnnnnnnnnnnnnnnnnnnnnnnnnnnnnnnnnnnnnnnnnnnnnnnnnnnnnnnnnnnnnnnnnnnnnnnnnnnnnnnnnnnnnnnnnnnnnnnnnnnnnnnnnnnnnnnnnnnnnnnnnnnnnnnnnnnnnnnnnnnnnnnnnnnnnnnnnnnnnnnnnnnnnnnnnnnnnnnnnnnnnnnnnnnnnnnnnnnnnnnnnnnnnnnnnnnnnnnnnnnnnnnnnnnnnnnnnnnnnnnntccatgtggtggaattcggcaagtatactaaagctacttggcgggtcattgcagaaccagggctcagagttgctgaagttctgaagcattgtgctgctctgccccgattcaagttcaattccagctaaaaagcccaataatcactggtgaagtgttcaggtcatgtgaatacgaaatcaccaaaagatttgactatataggttttctttttcctttttttctaagttacttggattttgaaatagctataggattctgagtagatattttgctgtcaaaacaacacatccataaagcattttaaacttctcttatactctctagaagttaggtattttgttcaatttcaataagacacaccctggccaggtgcaatggctcacgcctgtaatcccaacactttgggaggtcaagccaggcagatcatgaggtcaggagtttaagactagcctggccaacatggtgaaactcctgtctctactaaagatacaaaaaattagcctggcatggtagcacgcacctgtaatccctgctactcgggaggctgaggcaggggaatcacttgaacccaggaagcagaggttgcagtaagcgaagatcgcaccattgcactccagcttgggcaacaagagcaaaactccgtctacaaaaaaaaaaaaaaaaaaaggccctaagcaactccaccctgcctctaagtgggcccccttggaaggcatggaaccagagcaccatttagtcaataattgctgctatgtgctaatggtgccctggtggcctccagaattgactgcagcttccaaaagtgcccagcatgcaaccggaaagtgctgtgggtctttgcagaacccagctcgatggaaatcactgaaaacaattgcctttagtggcactgttatgtaaccactgagcattccctgcattcagctttgcacatctcacgtagcaggtatgtgacgagtgtgaaggtatgtggggaatgggtgtgttcttttttctgcgctatctgcttccccggtggaaggaggccatggtgaggatgaggtacacttgcctttagttaaacaagttcttttcggaaggagtacctaaggtcatagctgtgctcctgggaaggggaggccaggaggcatctaaaatgaggtcttactgatgaagacccccaggtacttgacaaagagtgtttccaacaaaaacaactctcaataccatttttaaactgaacttgcacacttctatttgtttggatgtggagagagaaaagaagaaatccacgtggtgggtaaagcacctgggtccacagccgaaatcccgggtttagtctgtttcattatacaaaattgggccatttacctgagttccaggctccacatataaaacacagacataatattactcacccatgtcactgggctgctgggggactctactaggacaacagaggcaaagctctgatataagctctttgcaaatgtaagaagtggtccttatgtcacccagtttagggcagtggttgagagcagacacattctgatccctcgaatctgaatcctatctttggcccatctggaagtgggacaagtttcttaaacctttgtgcctgggtttcctatctggggaagaataaattaacagatgcaaggaccctgaacagtccggtcggagactgctccagtccttggcaccgtcctgcattctgtgggtcccaacagtgtggtgacaccaggaagccgaccagccatccaaccagggtgtggtcctctggctgagactctctatcccacgtctgggcacccatgccaccagccggccttgaattccagggatgcgggaggacaatgagcatgaacgaaacgtgctgagtggagttgagaacgtaaaggaagaaggggacgatgagggcctctcctggggagattagggctgccaagtcctaagacacaggctcagggtctgcaggaaggtcggcttgtcggatcatctctgtgcgctgacttctctttgctccccagggcctctacccactgcccttgctcaacagcaccctggacgacgggaaggccaccctgaccccttccaacacgccactggggcgcaacctctcgactcaccagacctaccccgtggtggcaggtataacgcccggagcctccctggcaggtggagggcgggggactgaagagcttggctggctgtcaggcgggaggtgtgtggggccctggcctggagaggagaggtgggctgtgctggctgggcctcaaggcgggtcaggggggtcgcgcctccagtcccaggccgctcctgggtctccacgctccctcccgtgggagaggcgggcacacacactccttcccgctctctccattttcactgcagaagcacagcagggaggtctagcttctctctcccctccttgccacacctcgtgggccctggctccccggcccagactctgagagcagctgggcctgcctgccccgcgccccgcccgcgccctccacatctcatggcttggtttgtgcatgttcccgccccgtcatctcacacccctctctccttgttgtcttccctccctccggcagatcctcattcacccttcgccataaagcaggaaacccccgaggtgtccagttctagctccaccccttcctctttatctagctccgcctttttggatctgcagcaagtcggctccggggtcccagccggtgcctcggtcccgcccttcaatgcctttccccatgctgcctccgtgtacgggcagttcacgggccaggccctcctctcaggtacgacagggaagtcccggggccgtgcagctattgcggtgggcgggaggggggtcctcagggcagactgccagccccctctctggcctcaatctcatccaccaccgccctgttccctaattcctccggcaacttttggaggcgccaacatgctcggaaggggcggatgctgcaggggtgccaggaagtgggatacaccaccccaagactccatggaaaagcaggaaccctaaggccgggagccgggtgctgtaacatagcaacttggccttggtaaatgcataaatacatagaaggaaaaatgaacattttggagggaaaaaggaattggcttttggagccaatttctggatcaaatttctaaaaaggccaagggtcagtcccagttgtgtttccatgatgcagctatcttcattcctagcttaacagcatcaccgggaggacagtcagacatctgttaaacatgataaattcagtgattcaacaacttgagaggagtgggggacctcccatcaggaacctcaactgcctcaaaatatttaaagctggaagcaccgaccgggcgcggtggctcacgcctgtaattccagcagtttgggaggccgaggcaggtggatcacaaggtcaagagttcaagaccagcctggccaagatgatgaaaccccatctctactaaaatacaaaaaattaggggggtgtggtggcagacacctgtaatcccagctactggggaggccgaggcaggagaattgcttgaacccaggaggcataggttgcagtgagctgaggtggcgccatggcactccagcctgggtgacagagcaagactccatctcaaaaaagaaaaaaacaaataaataaaaataagtaaatctggaagcacctgagggagcctctagagcaaacctcttatgctgatgaggaacctggcccagggaggagaaggtccctgccaaggtctctgggcaggagcaccatctgcagctgcttgaggcctgggcctgcactgcatgagtcagacctcaagggaagctgggtcctcccggcagaaggaccttcgctcatccagccagggcctgaggaatggctgagagtcaagcgcttggcttgggttggagagggcctgagatgcagtgaaagtgggaagcagagacccatatggtcttcagatacctcaagggcttccacagggataggactattttagatgtgggcccagtgggggcccaggaccaaggaaggaagccagctagctctcagttcagcattggaggaatctctttaatatcggcactgtctccaaggagtgtgggtatttagtgacagagtcccacaccctcctaccctgacgaccttgaaatgctggagcagagaccagtgcgtgggtggagtgtgggagacctgtcacagaggcagcccagagtcagacagtccatctggaccagtggtttcaaatttgggcctctcaatgctctcttgaaatgaagccttttacagaagacatgtatgctcaccagacttttagaaggggtccctgcccctagaaaggccttggacttcgaaaccagaggattaagacttctacaagcccagagtaaccacagggtcatgtgataaaagtccctggaccctttttttttttttttttttgagatggaatctcactctgttgcccaggttggagtgcagtggcgcgatctcagctcactgcaacctccgcctcctgggttcaagtgattctcctgcctcagcctcccgagtagctagaactacaaatgggcgccactacacccagctaatttttgtattttcagtagagatggggtttcaccatgttagccagaatggtctcgatctcctgaccttggtccgcccaccttggcctcccaaagtgctggggttacaggtgtgagccaccgcacccggcccacggacccttttttataactggctctacattttctttctggctggcacccagggtttgttttttttcccctccgtacatccctgcacctaatgtgagaagttttcttagaagagagggacatctagtgtgtgggcagagagatgctgtttaagggtctaaagcgaggaataaaatgttgacttggagttcaagaactcaagagggtgaaggccacagagatgggtcgtttgttttgaccaaagtgatgaaaagagcaaaacctgtgagctgagtaaaattatgtcagccagagaaaatgggatgcggggtagggaggggaatgagaggagagtggagaggaagggaggggaagggaagggaggggaggggagggggtgaggagaagaggttcatgtcagtcacagggagttacgcaagcctgcatgtcttctgagaatggcaggctagggctgggggcggtcatggggcaggcaaggggtgagggtgtggtggtgcccatgatgatggggagcaggtgctgtggaagccgcggagaagcttggcaagaccagctgaaggagagggaaggatgtagggcagctggaaatggatagatgtatcagagtgcagacataggctgtggtgtaaagtgtaactggaacagcccagggcaaactccctgctcccaaagcccctacactttgtcccctccctgtcatcctgttagcatcccctgtcaacatgcagtcaatcagaggtgacgcctccaactactgtcagctgttaatttagtggacatgcccactctccaggccaactgcaggactgagaggtcacccaatccatgggacaaaacagctggcagcagacaccaggtagtcatgtagggatcaggcagccaaatatgcagcaccggcgtatctttcaggctggtggcccccaatgcaggcccagatgatgctgaagtgcaggtgtgagcactttgaaggttgctggctggtcacagggccccctagcccaagggttgacaattcagcacagaggcagaggctctgaaaagagtgaggagtgctaggcttggaggatctggggtccaggcaaatggccaagagtaggaagcaagtcagaaagcagctcaggcacaagggaggggatggctggtgtccatgctgagctcggggtgttggcctggagctccttacagactgtccacctgaggcctctggtcaagactggatctcaatacctaacacgtggctgagccatggtgagagagctgggaggacatgacggggggcggtggggaaggttaggaagggaatggttccaggagcgcaggaggctgcagaccttcccaagaagaggtgaatttgaaagaaagagaaggaacctgggcccgatggctcacacctgtaatcccagcactttgggaggccaaggtgggtggatcacctgaggtcgggagttcgagaccagcctgaccaaaatggagaaaccccatctctactaaaaatacaaaattagccaggcgtggtggcacatgcctgtaatcccagctactcgggaggctgaggcaggagaattgcttaaacccaggaggcggaggttgccgtgagccgagatcgtgccattgcactccagcctgggcaacaagagcaaaactgcgtctcaaaaaagaaaaaaataataaagaaaagaaagagaaggaagttgaggccacattattcctaggtaatgctgcagaccaggagagaggagagaggacacagtgagttttcattccataatcagctcagctttaacccgcgtgaatcttccacatgcctctgagtgactcccaaggaccctcgttgccgcctcctgcaactccttcacctacttcatagcgtttttctctgggtcacttatttccgcctggtggctctgatagtgtgatttccaaggtgactatccttctgagtctcagctcatccccagtcagccaagaaagaagaaacagcaaggtttggggaatagcaagagtgcccctaacattgctgccagttccctttggaagccccagtctggagtcccaacacactggccaagacagcaatgtcgaggccgtcctggtcccagctgctctgggactgactccagctcagctcaaaggaaagctgtgagttaggttttatcatcaaagagtccattcccctcctccatccttttgtacaaaattatatttagttctgccaaagagatttctgagttgccataaattctccttgctatcagaacgagataaggaattgaaaaggggttacatggagggcagacttcaaagggggaaaataaaatagtctgaaatcacctctaccctctgaattcctccaggcaatagctttatgattctggcctctaccaatatttagaatatttaccaatatttcaaggtgtggggggagctagagttttcctagagaaccccactccagggccagtcaacatgggcctatgctttctgtcaacttcttaaaataggaccacgttggaaagaaatttgggtgtagaggagatggaattcatagcgaggatagttttatgatgaagagtcttaaaaacagagaagtagataagagggcatggttaggccgtgatggagtttccaccccacagcttctgtggttttgtttctaagaaggcttgcaagcttcttggctttttggaagaaactatgcatttaagcaattggagcaaagagttttgtagggctgttgggagagtttattgtgccatagtctgggtgagagccatgctgaagaaagtcttagcagtctttccaggaagaccagctttcatggcaggaagcctcaggcgtctgttctgatgtccgattcagaagcctctaccccattgggacgacattaggtgactgaggggagatgaagattaaaaatcttagagtacaggggagtgagactgatgaattccatttataagatcaatgtaggggctagttctcatgcggtggagccccgtgggagcacctctggaccatattaagctgtgttgtaaggggagtatatgccctggaactctgcctgctactctgccaggctcgagaggcagcaggttcaggtaacagaacgagaaggaacaggatgaaggcagggggaaggggagtgcggggccacaggctgccaggccagaagcagccctgcagggcacgaggctagcaccagcaaacaggtgacctgagagtcaagaccacctcccactgctccccaccccgatcatggcagacacaggctgcctcagaatccttctcaacactgggtgccaggaagtccctaccagccaatcaggtagtcaggtgaatccagtttacaagctgaaatctaaactagttccttatgtgacaggcaggaagacgtggttcagagaattaagtggctgtctttcatccagggtccagcctggatctggagttccctttctgtctctctcatggaggaagaggtagggagggaagagaaaagaaggaagcaggcctgaatccgccaccaccctcttccatcactccctccctcaccacctgtccctgttctgtgctcctcctgctctcacagacttcctgtcactccttccctcttgcctagccggtgcttcatctgagggccaagggggctgagtttgagggtcgattgtgttgtattcttcttcaaagaaagctcagattttatctcagtatagcttctgcatatttctccctctgcgtctaaatatcttaaaattctcttttcccttcctgtgtttccagcccttcatttgttcccttgatgaccttgtgtcacgtgaactgaacacacctgtagaattctagtgggtttcaccccatttggtccggtgccaagcacagctggacactgcaggaaaagtcaaacaaattagaaggtggtgttcaggtttaccaaaacattcgcacggttttaaacaatgaacactgatggctctttattctgtaggagttcactggcatataaccatttctagaatgtgtccattgtgctaatcaatgtccccctgtagcatgaaaccatggctctgaattatacagataacctcatagaaattgtaataaggtgcctacagttatattttttttcccattttgcatatgaagaaactgacacttggggcacatactaggcttatctaagggcactcagaaaactagccacagaagcagtataaggactccaggccctctgattcccaggccctgccctctagaggaagggaagaagttgtgtgtgcctggtttttgttcattgaccccttgggcttggctccaaatgcctatcccagcctatgtcccttcttgatttagtgcctggccttgctaatttagcatcctggctttctgctatatacccaagtgcttagaaaagtgtctagaacatagtatttactcaataagtatttagtgaatgaacactgtctttggggaatctccagaaagagagataaggaggaggtagtcactgcagtattggcaacttacaggatttcatggggccttccttcccttctgtcatgaccaggtaccccttgaaggggctgaggtatgaaggacctgggggggactgatgggtggatagttggacaagcagtgccatagaggagatgaatttggtaagttggttaacagggctcacaggtggcccacacaggtcctgggaggaaaaagcagcccccaaaatggaagaggcagaaggcatttgggtaaaacagtcatagtccaacacaatggttcttagccagcagcgattttgcccctactacctcctgctgaggacatatggcaatgtctggaggcatttttgttgtcacactgggtgaaaactgctgctggtgtctactggatggaggccagaaatgctgctaaacatcctgcaatgcacaggacagcctcctgcagcaaagaattgtgcagcctaacatgccaatgttgctgagactgagaaactctgnnnnnnnnnnnnnnnnnnnnnnnnnnnnnnnnnnnnnnnnnnnnnnnnnnnnnnnnnnnnnnnnnnnnnnnnnnnnnnnnnnnnnnnnnnnnnnnnnnnnnnnnnnnnnnnnnnnnnnnnnnnnnnnnnnnnnnnnnnnnnnnnnnnnnnnnnnnnnnnnnnnnnnnnnnnnnnnnnnnnnnnnnnnnnnnnnnnnnnnnnnnnnnnnnnnnnnnnnnnnnnnnnnnnnnnnnnnnnnnnnnnnnnnnnnnnnnnnnnnnnnnnnnnnnnnnnnnnnnnnnnnnnnnnnnnnnnnnnnnnnnnnnnnnnnnnnnnnnnnnnnnnnnnnnnnnnnnnnnnnnaggacacaggagcgatagaagaggggcaggggcaagggatcatgtttatgttcattgttatatgcagtagatggggagatgctcaccaggtcaggtggggcctccaaaatgggaaagtgatttctcgatgtagaggagaagcagagccgggaaatgaggtctttacagagctgatttggtatcaccaaggtgggggtatgacccacaagctatagataaacagagagattggtgtctgttttgctaaaaatggttcttttcaaaatagaatggacagatatgtggcttgtggtcatataaaagctaaatatctccgccacatctccttctaggttggggttagccaatcggtttcctgtacctggcaactctgatagattgcatccacttggaaggccccctctactcagggggaaatgatatagtggttgattagcaatgtctgtcacaggccccccaaaaaatagtgatgagttagtggcccacatacatgccatcccttcatagggtcttactcttggtatcctcagagccgggaatgaaagggatgagctctgagtcaagtggcctcaaatgtatttatggaggccagctatacccactgctctgctggctgctgttgggggtaacaaagaacagaagacataacctcagcctccaataccaggacattcttgtggattaataagataacaatcacgtaaacaaaaccactggagaacagggaacagtgtgagactgcagtaacaagtgctccctgcatggtggagcctctgtcctgcagaaaaccagacagaggtgaaaagaacttgggctcagatgaggagtgggggcaggaggaagtgggtttggagaatggctgtagagagggtgggaatggcatggaggaagacagcctcaggagagtgagatgatacatatgggagcccccatggtccaactgacgactctttgctgtatttttccagggcgagagatggtggggcccacgctgcccggatacccaccccacatccccaccagcggacagggcagctatgcctcctctgccatcgcaggcatggtggcaggtaaggagagggccagcaggaaggggagcactgcaaagaggaagtattggagcaaggtgggacacaaggggcaagaggcatactgtgccctattcatagacttcctaaagggcattgaaggatggaccaaagagggcatctccttgtaaatgcctggagacgatgtcccagtgcagtcctgactccctatttaacttgccccagctcggcctccttcttcccaggcctgctatattaccctccatgatgaaagggaagggctgagacaggtctgtgttcaaatccaagctccaccacttcttccagtgaatcagtgagcataaatggagagcactctaagggccccaaaacactgtgagtggaagatgaaccctaccctcaagcagtgctggtctcccagtgatttaactctgatgaatcccagtttgcccgttctgtaaaatctgaatctgaagggtattgatgatgatgatgatgatgatgacgatgacgatgatgatgatgaaatatatgcttcacatcnnnnnnnnnnnnnnnnnnnnnnnnnnnnnnnnnnnnnnnnnnnnnnnnnnnnnnnnnnnnnnnnnnnnnnnnnnnnnnnnnnnnnnnnnnnnnnnnnnnnnnnnnnnnnnnnnnnnnnnnnnnnnnnnnnnnnnnnnnnnnnnnnnnnnnnnnnnnnnnnnnnnnnnnnnnnnnnnnnnnnnnnnnnnnnnnnnnnnnnnnnnnnnnnnnnnnnnnnnnnnnnnnnnnnnnnnnnnnnnnnnnnnnnnnnnnnnnnnnnnnnnnnnnnnnnnnnnnnnnnnnnnnnnnnnnnnnnnnnnnnnnnnnnnnnnnnnnnnnnnnnnnnnnnnnnnnnnnnnnnnnnnnnnnnnnnnnnnnnnnnnnnnnnnnnnnnnnnnnnnnnnnnnnnnnnnnnnnnnnnnnnnnnnnnnnnnnnnnnnnnnnnnnnnnnnnnnnnnnnnnnnnnnnnnnnnnnnnnnnnnnnnnnnnnnnnnnnnnnnnnnnnnnnnnnnnnnnnnnnnnnnnnnnnnnnnnnnnnnnnnnnnnnnnnnnnnnnnnnnnnnnnnnnnnnnnnnnnnnnnnnnnnnnnnnnnnnnnnnnnnnnnnnnnnnnnnnnnnnnnnnnnnnnnnnnnnnnnnnnnnnnnnnnnnnnnnnnnnnnnnnnnnnnnnnnnnnnnnnnnnnnnnnnnnnnnnnnnnnnnnnnnnnnnnnnnnnnnnnnnnnnnnnnnnnnnnnnnnnnnnnnnnnnnnnnnnnnnnnnnnnnnnnnnnnnnnnnnnnnnnnnnnnnnnnnnnnnnnnnnnnnnnnnnnnnnnnnnnnnnnnnnnnnnnnnnnnnnnnnnnnnnnnnnnnnnnnnnnnnnnnnnnnnnnnnnnnnnnnnnnnnnnnnnnnnnnnnnnnnnnnnnnnnnnnnnnnnnnnnnnnncatcgaacacctactacattcatgttaggtacatgataaatgcttaaagcaaggcatgccaaagacattcatccatcaattgtgaaaggaaggaagtgatcacttattatgtacttttgcatgtctagccattcaaatatgtataactttatttctaattttaccctgaccataagactaagaggctaatactatcccagttttatggataaggaaactgaagcaaaagcaaagtggtgtgctcagggtcataatcatactaagtggctgagttatgcaaacacggatttttcaatttcaagtctaaggctctttcctctacaccatactgcctcctaccgtaccagaaataaagacacaggctgcaagagaggagcacaggaaaagggctaggacagatttcccttgtctattcaccttctgtttctgttttattttattttattttattttattttatattttattttattttattttttattttattttattttttattttattttattttattttattttattttattttttgttctgactccattaacagtcaatgattctcaaccagttctagagcagaaccagcagctccagacacatggatccatccagtcatctatctttccactcattcatcttcccgtacatttttccacgcatccatgcattttcccatctatccttccatctttcatcacccatcccatcatcctccacctttccaccaatccttccatctttccatccatctttctttctttttttttttttttggagacggagtcttgctctgttgcccaggctggagtgtagtggtgtggtcttagctcactgcaacctctgcctcccgggttcaagtgattctcctgcctcagcctccccactagctgtcactacagggacccaccaccacacctggctaatttttatatttttggtagagacggagtttcaccatgttggccaggctggtctcgaactcctggcctcaggcaatctgcccgccttggccccccgaagtgttgggatacaggtgtgagtcaccgtgcccggtccctccatccatcttttaattcatctgtctttccagttatctatcatccatctttccatccatcaatccttttatttttccatccatattcattcatccattcatcttttcatagaactatcctttaatctgtctttccatccatcctttcttcatccattcttccacccatccctcctctcctagatccatcttttcatccccttttcaatctattcctccattcatctatccatctttctatatatacatccttttatctgtccatctttccatccatcttgtcacccgtccgtcctttcatcatcaatccttccaccattcacactttcattcatccttccatccttccatccatttaccactttttcacttaacaaatactggttgaaggtctactgtataggatgctggggatacagcagtgaataagtcagattcctttattcctggagcttataacctaatggtgaagacaaatggacaataaataagtcaatgaatgaacataataatttattgtctgtgaagacaataaaatgggatgatgtaataaagagccacagggagaggagataactactttagattgggctgtcaggggaggcctctctgagaaggtgttcaaagtgaccattcaagtgataaactggggcagaccatccctggaccaaagaacagcaagggcaaagggcctaaggcaggaactagtttagcatggtagcacaaaattgtagtggctgggttgagttttaaaaggctactctgacttctaggaaaatgaattgtacatagtcaagagagaaagcacaaagaccagttaggggacagttgcagtagttcttgcaagagatgacagtggcttgagttagggaattagcagtgaaggagggaaaaagagaccctgaaaatatattttggttgcaaagccagcaaaccttgctggtagattggctgttgggatgagaaaatagaggaaacaaggatcatttgtaggtttggggcatggatgatggtggcaagtatatatatgggagaccaggaggggaagtgatgtagtagatggcaggtggaaatcaagagtnnnnnnnnnnaaggagggacttgccctacacagctgggctcccagtgagttccatgaaaatcagttttagaaaatgcaatactatttaaatgaatcacttggttcctaggaatggcactgtgcaaatgaattcttaaggaaatttttttgtggaaaaattctatgtccgtctcttaccactgcttgcaatctcccagttgattgaatggggactcctgcaattaaagtgaataaactttcatcgaacacctactacattcatgttaggtacatgataaatgcttaaagcaaggcatgccaaagacattcatccatcaattgtgaaaggaaggaagtgatcacttattatgtacttttgcatgtctagccattcaaatatgtataactttatttctaattttaccctgaccataagactaagaggctaatactatcccagttttatggataaggaaactgaagcaaaagcaaagtggtgtgctcagggtcataatcatactaagtggctgagttatgcaaacacggatttttcaatttcaagtctaaggctctttcctctacaccatactgcctcctaccgtaccagaaataaagacacaggctgcaagagaggagcacaggaaaagggctaggacagatttcccttgtctattcaccttctgtttctgttttattttattttattttattttattttatattttattttattttattttttattttattttattttttattttattttattttattttattttattttattttattttttgttctgactccattaacagtcaatgattctcaaccagttctagagcagaaccagcagctccagacacatggatccatccagtcatctatctttccactcattcatcttcccgtacatttttccacgcatccatgcattttcccatctatccttccatctttcatcacccatcccatcatcctccacctttccaccaatccttccatctttccatccatctttctttctttttttttttttttggagacggagtcttgctctgttgcccaggctggagtgtagtggtgtggtcttagctcactgcaacctctgcnnnnnnnnnnnnnnnnnnnnnnnnnnnnnnnnnnnnnnnnnnnnnnnnnnnnnnnnnnnnnnnnnnnnnnnnnnnnnnnnnnnnnnnnnnnnnnnnnnnnnnnnnnnnnnnnnnnnnnnnnnnnnnnnnnnnnnnnnnnnnnnnnnnnnnnnnnnnnnnnnnnnnnnnnnnnnnnnnnnnnnnnnnnnnnnnnnnnnnnnnnnnnnnnnnnnnnnnnnnnnnnnnnnnnnnnnnnnnnnnnnnnnnnnnnnnnnnnnnnnnnnnnnnnnnnnnnnnnnnnnnnnnnnnnnnnnnnnnnnnnnnnnnnnnnnnnnnnnnnnnnnnnnnnnnnnnnnnnnnnnnnnnnnnnnnnnnnnnnnnnnnnnnnnnnnnnnnnnnnnnnnnnnnnnnnnnnnnnnnnnnnnnnnnnnnnnnnnnnnnnnnnnnnnnnnnnnnnnnnnnnnnnnnnnnnnnnnnnnnnnnnnnnnnnnnnnnnnnnnnnnnnnnnnnnnnnnnnnnnnnnnnnnnnnnnnnnnnnnnnnnnnnnnnnnnnnnnnnnnnnnnnnnnnnnnnnnnnnnnnnnnnnnnnnnnnnnnnnnnnnnnnnnnnnnnnnnnnnnnnnnnnnnnnnnnnnnnnnnnnnnnnnnnnnnnnnnnnnnnnnnnnnnnnnnnnnnnnnnnnnnnnnnnnnnnnnnnnnnnnnnnnnnnnnnnnnnnnnnnnnnnnnnnnnnnnnnnnnnnnnnnnnnnnnnnnnnnnnnnnnnnnnnnnnnnnnnnnnnnnnnnnnnnnnnnnnnnnnnnnnnnnnnnnnnnnnnnnnnnnnnnnnnnnnnnnnnnnnnnnnnnnnnnnnnnnnnnnnnnnnnnnnnnnnnnnnnnnnnnnnnnnnnnnnnnnnnnnnnnnnnnnnnnnnnnnnnnnnnnnnnnnnnnnnnnnnnnnnnnnnnnnnnnnnnnnnnnnnnnnnnnnnnnnnnnnnnnnnnnnnnnnnnnnnnnnnnnnnnnnnnnnnnnnnnnnnnnnnnnnnnnnnnnnnnnnnnnnnnnnnnnnnnnnnnnnnnnnnnnnnnnnnnntgagctttctactaaatgtccagttttaataagtcagcaggtacatcatgtgtgtctgaagccaggaaagaatcctgactagagtataaatttcagccattgcacaaagctgtcatttaatgacaagactactagaaaccaagcctggggttcttcaacaatttagagctctaacagagaaggaacagcaagaagaatgagtaggaaagacaactgagttacaaagcaaacagaagactgggcatcacaaacccaaaggcatggagacagggatgagctaaaaggtcaagggaattgagtatatagaagtgaccattggtatgatggagttagagactgtggggacttgaggggatcagagttggcctgataggaagagataagaaggtgaaggcagagaccatggggcagagaaaggcactggtagctagagaggaatgtggggataggaagaggattttttaaagacagaagatagcagaatatgtttgcagggtgaagggagagactgatgaaacagaaaacgggatcattggagcggccaaatccttggaaaggtgagtagggtgggatgcagagcaaagaggcagggttggcctttcattggggcagagacgtttcatctgctgtgactgcaagcaggtaggcacatctgatgacgggaagatgccacacccaggtgtgtaccacctaccgagctccatcccctgccccaggttccatgtgactgaggtactcggtaaatggtagttaaatacataaataagtgggtgagtgagtgaatgcatgaatgagtgacaaaatgagagggtaaacacatcatgttttccacctctctcccttgtcctctagagctcactgtgtttgccattgggaagggtgtggtaaaaggtgagagggcccttgctgtgtggccagtagagaatcggctgaaacccgggagacctgagttaaacaggaggcagttggcactgggagatgcaagagagagtaccattgtggaaggacggggccagggttctagttccggctttcactgaacatgtggccttggccaaatgtctttacttccctatgtcacagctgtgttatctgttaaatagatgtttagagtagattatttcttagtttttcatctgttaaatagatgtttcgattagattatttcttagggttttttttctttgcttttttacttctttacccccttcctttttttacccatgttttttgcttgatttatgttagacttagtctctgcccctaaggaactttcttactgtgttcttagtccatcattgacttcctagacaaggaaaggatccagtagcctttctctgctttaggcttctcctcttcatctctcttcttcctgtataaatgcctacttgtctggcaataaagcagctcccactaaccccaacccaggccttaagactggttggatgactgatttaagcctccattgagctttattttcgcacctgtttaatgggaaaataataaaagcttacatttattgagcactccctatatatttgaagcatggtgctaagcatttaatacgtattttctcatttaattctcattaaaccaaatgagatagggataattatttggcccattttacagataaggaaaccaaggttcacctgtaagtcactcactcagagaggctaagtgacttgtccaaggttacataaccaggaaatgggaagtaaggatttgactctagacaggtcagctccagagtcagggagtttcgagcaacccctccaaagagtctggggaaggagactcagaaccacgtagctcccaatcgtaggtgagtttctgaaaggctgggtggacattcattgagtctcagggttggcaggaatctagctttgtaaatggaattatcgcataagtgaataaagggattatctgcaatttggaatcaagagccctaaggtcgagttctactctgacatttaacaacagtgtgatttgaggcaaactgcttaatcatgctgcactccagtttccttttctataaattggtagtatccatgagtacctcatggggtagtcttgagaataaaagatcataatgtatgggaaagtactttacaaactttaagctctttaccaagcaccagtagtagctgtggtgatcactttgactttgtttttgttatgtaagggaattcttaagtaatttcttcggtaaataattcctttggaaaagtcaagaatccattaacagaaggaggtgatctgatttactttgtgtaaatttatacgttgagtttgcttaaagtggcagactcaggatggaacaacaaactactccaagtcccaggacacagcttcctgagggtgtgtgccctctggggctctccctcctctcccatccttaaccctcacacctcccctcagccccccatgcacacaaacacacacactcatacctagggaggctaaaaggttcatatatatggatgtcctctttggcccctaaccccatacccctgctgtggggccctcccagaagaccccttctccagaaggtccaggcagcagaaggagcagttagtccctgggccctacagtcatagcacagtttcccagctccaccaaaccctccagctctgggagcttccgcagatcccagaggctcagtttcttcatctggaaaatgggggtagttataacatctaccttctgggcctcctgggagggctgtagtatgtcaagccagtgcctccagtacctacggaaaaggacactgccccaaattatccagaccgatgggttccaaaagggatgacagagggaccttctgagctctattgtccctgccgtggctccaactgtctcccccaccattcctgagcttgcccattgccagccctgcagaccttaccacaccccagccctgcattgatgcccttcacctcacaggcctctcccctgtgtgcctccaacaggaagtgaatactctggcaatgcctatggccacaccccctactcctcctacagcgaggcctggcgcttccccaactccagcttgctgagtaagtccctggggctgcccaggcctctgctgggcaggatggatggagtggtggggggcaagggtggttcaaaggttacctgaaagctgggagtcctcagattatacagagggcctgggagatggtgctgtttgtgatggaagaaggcagcaggagggcagtgtacctggttgtttggggaaagagggcagaagtccagaggcttccaggcattcgtttccctcctgcttctcaagcccatgtcttttaaatctttgttttgtgtaagattcagggctcaggccttgaaggggaggacaagggaggacttgagaaaagcctaagacaggacctcctgcctccacggcttacagtcccacagtgcagacactgacgcagggcacccgccagaatgtaactgccctccttcctgggagccagtttcaagaatgccatcctgttgcccccattaaccatctaagtggctcagaaatactcatgattcagcaccaaacgcttaaacagaaatcttttgttccaccacattccccatatttagcctgagatgaagacagtattcagggtcaaggtccagagagtgagcttcagcgagcttccaggcttctcttcacccctctcttgtcctggggtcctgaactgggaagagaagcttttcagcaaagcaaaactccaccaatggggggacttgagggatcccactagagcctccctgagtggtggccttgggggtatcagagcaaaccggagccagacagaagcagtgatccaaggatggccaaccccacaggcaccattgcaggctaggaaccatccattccccaagaccccctctcctcccattacctctttgtattccagaaataacttgaaaggtggcagacctgggccctgtttgccagatgagttcaactccaacccacctttccattcaatttagccagaaaagacgagggcagtgagacatgccagggttcaggcaccttcccactgagcctccccaggctgcccatcctgcaggtgtgcagagcctcaccttaagggccgtcaagcccagatcccctttgacccctcagcagtctaatctccctgggtcttaagaaagaagactctctgtcctggcactgtttgggcaaggctagggaggatcccgatgacctctcagtgcacttgattctttggggttccacatgcaattgttttctattgccctctccctattgcaacgagggtgttgaaggtcaaagcagtcatagggggaaggggcaagaagccactgttctcattctggccagaaactcaaaggtgaggccagagaaggaggaaatagggctggagaggagttaatctttgatgatcagataggccagagaaatgaatgattaacttgtgttgtcttaaaggtcagcagatgcagggaaggctgtggtgcaattttcctttctgaccagcagtgttgttgttatttttttttaatgtgtccaggttccccgtattattacagttccacatcaaggccgagcgcacctcccaccactgccacggcctttgaccatctgtagttgccatggggacggtgggagcgactgagcaacaggaggactcagcctgggacaggccccagagagtcacacaaaggaatctttatttattacatgaaaaataaccacaagtccagcattgcggcacactccctgtgtggttaatttaatgaaccatgaaagacaggatgaccttggagaaggccaaactgtcctccaagactccttaatgaggggcaggagtcccagggaaagagaaccatgccatgctgaaaaagacaaaattgaagaagaaatgtagcccccagccggtacccaccaaaggagagaagaagcaatagccgaggaactcggggggatggcgaatggttcctgcccgggcccaaggggtgcacagggcacctccatggctccattattaacacaactctagcaattatggaccataagcacttccctccagcccacaagtcacagcctggtgccgaggctctcctcaccagccacccagggagtcacctccctcagcctcccgcctgccccacacggaggctctggctgtcctctttctccactccatttgcttggctctttctacgcctccctcttgggcatgggctgagggctggagcgagtccctcagaaattccaccaggctgtcagctgacctcttttgcctgctgctgtgaaggtacagcaccaccccaggtcctcctgcagtgcggcatccccttggcagctgccgtcagccaggccagccccagggagcttaaaacagacattccacagggcctgggcccctgggaggtgaggtgtggtgtgcagcttcacccagggcagaacaaggcagaatcgcaggaaacccgcttccccttcctgacagctcctgccaagccaaatgtgcttcctgcagctcacgcccaccagctactgaagggacccaaggcaccccctgaagccagcgatagagggtccctctctgctccccagcagctcctgcccccaaggcctgactgtatatactgtaaatgaaactttgtttgggtcaagcttccttctttccaccccccagactttggcctctgagtgaaatgtctctctttgccatgtggggcttctctccttgatgcttctttctttttttaaagacaacctgccattaccacatgactcaataaaccattgctcttcatctcaggctttggggttggctggagaaggaggcaccccggggctgggctttctcccaagaacatcagagctgagtagccgacaaactcactttggggccgtgggctggaagggaccatctgatgccccagagctctggcttggccttctccctctgcctttaattcacgttgaacgctgggtacctcactcatcccaagttcttcaacactgagcaaatgcaagaatagcacagtattgagccaaccataaactccccacaaggagttgctgttgttattaacaggaagccagagaatcagcagggtgggttagtgagggatccgggaatagctgtgactggagcctgcataaacagctctgaagggagagagaagactgggctctcttgtgtgccaagcacagtatggaaggcttcatataagttaagctgaaattagccctgttttacatacagcttcattttacatatgaggaaactgaggctttgaaaaaaatgagatgtcttgcccaagatgagaagtagtagattcaaccaagtcctcttactctaagcccaacgcttttacccaaaaccccagagtcctctcatcagggatgccaaatggttctagacccagtggaggttctggagctgccactggggatttaatttcttttgatttgctaaagatttgacctgactgaatggagaggtagagtgtagtggggccaggacaaggtgagggaggctgtagagacttaggactttaggccaaccacctccaggaaatttgggaaatgcaatgtgaccgctcgggctctgcactccagggggctgtctggtgtccacatggaccttctccatgtgagacacagctggaacaagggggcaggggcctgcagctgggatgcccaggtgaatatgggcagctggacaaacaacactgggattgagtcagatagaaggggcccaaggactccagggctgggaggacagaggctgggagagagggctcttacctccttaggcctcccaaagagcggttagggatgctgccatggatggcatggcagggggaaccctcctggaagaaaatccatctcttctgaagggatctgagatgcggctggtttttcaatggcagaacttccctctgcagcgcgactccgaatccatgacatctgagagtcttcctgaccacaaacctctgggatcccgagtgctccctacccaagaatcactttgagcacagcatcccaaggaacccatagagcgatcccttgcattcacagccacagcccctctggggacactctgtacccccggcagaccctttccaactcacaacaaataaaggggcttgggctgtgctttggctaa

SEQ ID NO: 78 - DNA, 5915 bp, Human
gcgtgagtgagtacagaagggaaatgagtgagggggcatgggatctcagagaaaatcagggccctctgagcaaagtggaaaggacgaccgccgcagctcctcgggccgtagctcgaccccgccttcccttttgcgcagaatcctcgccttggctgcagcagcgcgctgcccccactggccggcgtgccgtgatcgatcgcaggctgcgtcaggagcctcccggcgtataaataggggtggcagaacggcgccgagccgcacacagccatccatcctcccccttccctctctcccctgtcctctctctccgggctcccaccgccgccgcgggccggggagccaccggccgccaccatgagttccttcagctacgagccgtactactcgacctcctacaagcggcgctacgtggagacgccccgggtgcacatctccagcgtgcgcagcggctacagcaccgcacgctcagcttactccagctactcggcgccggtgtcttcctcgctgtccgtgcgccgcagctactcctccagctctggatcgttgatgcccagtctggagaacctcgacctgagccaggtagccgccatcagcaacgacctcaagtccatccgcacgcaggagaaggcgcagctccaggacctcaatgaccgcttcgccagcttcatcgagcgcgtgcacgagctggagcagcagaacaaggtcctggaagccgagctgctggtgctgcgccagaagcactccgagccatcccgcttccgggcgctgtacgagcaggagatccgcgacctgcgcctggcggcggaagatgccaccaacgagaagcaggcgctccagggcgagcgcgaagggctggaggagaccctgcgcaacctgcaggcgcgctatgaagaggaggtgctgagccgcgaggacgccgagggccggctgatggaagcgcgcaaaggcgccgacgaggcggcgctcgctcgcgccgagctcgagaagcgcatcgacagcttgatggacgaaatctcttttctgaagaaagtgcacgaagaggagatcgccgaactgcaggcgcagatccagtacgcgcagatctccgtggagatggacgtgaccaagcccgacctttccgccgcgctcaaggacatccgcgcgcagtacgagaagctggccgccaagaacatgcagaacgctgaggaatggttcaagagccgcttcaccgtgctgaccgagagcgccgccaagaacaccgacgccgtgcgcgccgccaaggacgaggtgtccgagagccgtcgtctgctcaaggccaagaccctggaaatcgaagcatgccggggcatgaatgaagcgctggagaagcagctgcaggagctggaggacaagcagaacgccgacatcagcgctatgcaggtgcggcacggccagaaacacaggggggcgggggactcgagcaagggggggagttggtgcgcccagaaagtggagaccaggggtggtgcggctgcacgcagctcttagggatagggcttggctccttggccactgtgtgggaggggtggggcacttgaagggcgtgagtgcgggcgccactgtagtctgggagtgtgctccgtgctgctgcaccggcgttccgcattaaagctgcccagcccttgttgggtgggggaggggaagacgtgggaattgggcgttgcctccggcctgcagtgagatcagctctctactgacctgcattaaccacaagttactttgcagcaactatcggatcatctagttaataaatagtagagtgaacaactctcaattaattctgaaggattactgtgaccagcatgctttatgactagttttaccaaccactcccttcctttatttagtaggtagacaggaaaatagtcaacattgttttaggtagttaactagtgatgttcatagtaaaccatttccttttaccttttttttttctttttttctttatgtgtaaaatcttctacaacatttctgtttaaacatctccatcttctggggagtagaaaaaatacaattttaaaaagatctccattttaaaacatctccatcttctggggagtagaaatttttttcttcttctggggagtagaaaaaataatttagatacataggaaatatttcatagaaaataatttttttcttttttttgtttacatctggctattttcttctcataaagaaaggcattagtttcctggcatgtaacccagctaaagaagagttaatcagtgaatgagagacacagtttttctatcaacttagtctgtttgcatgcattttatgatgatcattaaacagtattaagtaaagaaacagaagaacagaattttcgtccatcttttttttcatctcaggcttcatgaacttgggtattttaggcatgaaggtttttcaaaagatacaggaagttattctaggagagattttatcaaaggtgtgcaccttgattttaatcgaaactaggcctttgcaactacactacagtaaaataatagaagggatttatgctcggattttttttttgttttatttttgtcttcaaacaggacacgatcaacaaattagaaaatgaattgaggaccacaaagagtgaaatggcacgatacctaaaagaataccaagacctcctcaacgtgaagatggctttggatattgagattgcagcttacaggtgaaaatagaggggcaaagacagcagccattaaaccttaggaagaaaatcagatcccatttaaagttatgttggatcagaaaccttcaataatagtccttttgaaataatgaagtgttagtttttggcttcttccaagaagagggtatttagatatataagaatttaaccctgtaattaggagtcctgtttttatcttgtcattacactttaaatctaataggatgatttatttatattttttctggtctccatcaaaagatccccaggcattaagtattgataaatcccagccctgctcctgcttgcctttgtgtttagggtactcagagcaagttgtgaaacacaggtgttttttaacctcaccttgcatctgcatccccaggaaactcttggaaggcgaggagacccgactcagtttcaccagcgtgggaagcataaccagtggctactcccagagctcccaggtctttggccgatctgcctacggcggtttacagaccagctcctatctgatgtccacccgctccttcccgtcctactacaccagccatgtccaagaggagcagatcgaagtggaggaaaccattgaggctgccaaggctgaggaagccaaggatgagcccccctctgaaggagaagccgaggaggaggagaaggacaaggaagaggccgaggaagaggaggcagctgaagaggaagaaggtatgataagaaaaaacccctgcaacttcaagtgtaaactgggtgtggagatttgttaggaggtggataagacaaatgaagccttgctcatttattcatatatgacattagaatcataaataaattttctgtttgtttagcaaaactttcctaaggcatctactctgaatgaggtgattggtcaaaattttcattttttaatataatcatttaacacagcaggttggtgtcctaaagaacaaaaatagataccagacacataatgaaagaaatattgaggttaagtcttggagaggagcagagcttcccatacctagaagtgatctcattcgatttaaatatgtgttcagtggcaaattattcatggcaagctttgtctgttacatgtgcttttggagagagtggagctgggaggttttggtagcattctgacagttgtgtttgcaaataaaacctttgcagacatgttttgactggacttaccctggatttgcattttgtacattttctttttatgttaaagctgccaaggaagagtctgaagaagcaaaagaagaagaagaaggaggtgaaggtgaagaaggagaggaaaccaaagaagctgaagaggaggagaagaaagttgaaggtgctggggaggaacaagcagctaagaagaaagattgaacccccatttccttaattatttcaggaataattctcccgaaatcaggtcaaccccatcaccaaccaaccaaccagttgagttccagattctatgtgaattaaaaagtcaatatatgtataattctgagatgacttaggttggacattcaatgttgtgctatgaatttcctctttatgcagagtatctgtttgcttgcagagtggctttctggcttgctgccagcctgtgcatggaccacgcttatgagttcaggatctacggcaatgtgaatcattcagatgtttacaataaaaaacaccacatgagtaaatgaattcactaatgttaatgttaaacttcatggaaaaatagtcctttgaaccttcggtggttagcaattaaagaccctgagttatgtgcaataaatagtaaataaagttataccgaatgatgtattttttgctgtggttgttacttaattaaaataccttaaagatggcaccaatataaagtatataccagtggactattgacctccaattttttaaaaagttgaaattttaacaattaccaatacttttttttcttccttcaattggaaattctgagggatacagttatgtcatgattacttgtgaaatctctccccacaaaaattttactgataataaacatgagtaaatgagaaagtctataaataacaatagactttgcctcataacacgtgttgtgttaggttttgggatggctttctagggagcaattctgaaattacttgacagatacactctttatggtaaacaggtcatttcagagtctagagtgctaaccattacactatggaaccatgataaataggtcatttcaaactgatatgtcacaatgcaatatggatagaatatgaatcccatacattcatccctataactgcattttaaaatatagtctaaatatcatgggaggaggttaaaacctgagaacatggtacaataagaaggaataattttttatctatatataatttcaggagaagggattaaaactaccaaaggttatttgccactccactgcaaacatgttgcctgcaatcctgagctcatgatttagtgtgttgttaagcgtaattctgttgcctcaagtaaataccacttaatgctacacatttttaaacctttaaaagctacagacacaagtaatgaaattatgagtcacttaaggggggaggtaatatgcttgtatgttacattgacattgctctgcatgtctctactgggagatatttggatttcaatgatagcttgactggttggacattgcatcaaatacacgccccatgtatcctttctgtcgtaaagttaagaacgctcttgcatttgatgtggaataaatatagatgatattactatctgctattctgcctttgttctgaaacaattgctttgtcagctaatttcattcaatatttgttttttagacgatctctataagttattaatttaacctgaaaccaaagtggtctccatttaaagttacttaatccctttgtaccacctatttctagttaaatatatgttgctatgcaaataggtaaagtgcttccttgccatgatggtaatggattggaactatgaaggctctcagtgtattggcttctgtaaagatgaggcgtctcctcagaaacaaaacttttcacatttctgcttactagacctgggttgatgtacatggtaagtctcaaacagatgcaagctatgtgcaaaaagtaactttagccaaatggaaatagctggatgctttgagaattacttggttgaagtaagaaaactgtaccatcctctatcctgtgtgccataataaaatagtaaaaaacctaaa

SEQ ID NO: 79 - DNA, 3862 bp, Mus musculus strain C57BL/6J
cctttccctcttctcccccgttcttctctctaggtcccccatctccgccccgggcctgaggggcgcaccggccgccaccatgagttcgttcggctacgatccgtacttttcgacctcctacaagcggcgctatgtggagacgccccgggtgcacatctccagcgtgcgcagcggctacagcacggcgcgctccgcgtactccagctactccgcgccggtctcctcctcgctgtccgtgcgccgcagctactcgtccagctctggctctttgatgcccagcctggagaatctcgatctgagccaggtagccgccatcagcaacgacctcaagtctatccgcacacaagagaaggcacagctgcaggacctcaacgatcgcttcgccagcttcatcgagcgcgtgcacgagctggagcagcagaacaaggtcctggaagccgagctgttggtgctgcgccagaaacactctgagccttcccgcttccgcgccctgtacgagcaggagatccgcgatctgcggctggcagcggaagacgccactaacgagaagcaggcgctgcagggcgagcgcgaggggctggaggagactctgcgcaacctgcaggctcgctatgaggaagaagtgctgagccgcgaggacgccgagggccggctgatggaagcgcgcaaaggtgcggatgaggccgcgctcgcccgcgccgagctggagaagcgcatcgacagcctgatggacgagatagctttcctgaagaaggtgcacgaggaagagatcgccgagctgcaggctcagatccagtatgctcagatctccgtggagatggacgtgtcctccaagcccgacctctccgccgctctcaaggacatccgcgctcagtacgagaagctggccgccaagaacatgcagaacgccgaagagtggttcaagagccgcttcaccgtgctaaccgagagcgccgccaagaacaccgacgctgtgcgcgctgccaaggacgaggtgtcggaaagccgccgcctgctcaaggctaagaccctggagatcgaagcctgccggggtatgaacgaagctctggagaagcagctgcaggagctagaggacaagcagaatgcagacattagcgccatgcaggtatagtacggtttaagctcagtgggggtggggaggtccacggtaggggcggcggcggggggggggggagtcagggtgtacccagagagtgaacgctagggggttctagagcacagagcagctatcagagggcttggcttccgagaggttgtggaaaggatggggcatttggagggggcggggcgcgactgctgcctggggattgcttgttctggttgaatcagggttgttaggggtgagttgggaggaaggggcggagggagtcggagttgggcgttgccaagtaatgccttctctttactgacaacccttaactcccaagttaccctcagtacttcctggatctcctggttaataaatatgcctgctagctctcactagttttgggccacccagccttgggatagtttttttttttaatagggacacaagaatacagtcacaatattttagcaattaatcactgcagtccattaaaaaaaaagttcttcatctttggcggggggaagcattttagacaaacagctacacaaatatatataatttaatttttatttatatatttatttagacaaacacacacacactatatatatattccccttcccaaatgcgacctggctaaaagaaatgtgacaagggtggttaataataataataatatcatcatcaatttggtagttttaaaagacagcttaccataatcaattgagaacaattttcaaaattgttcacatcagtctactcccctcctcttcctcctctccttctcttgcttcactagactgggcattttaggccaacccctccccctatgccccaccccaccccattattttaagggagatttctggaaggtgtacactttggagttaactaagaccagaacttatcatggatactacagtaaaacaaatgcagtagagatttgtgttttgaattttttaaaacaatcttcctacaggacacaatcaacaaactggagaatgagctgagaagcacgaagagcgagatggccaggtacctgaaggagtaccaggacctcctcaatgtcaagatggccttggacatcgagattgcagcttacaggtaacatcagggtggtgctggcagtgggcatggcggctcaggacagagcagatgacccagtcagtgcagttatagtgagtcccacgtgctctagaatagtcctactttggtcttcctccaagagggtacaaatgtgtagggaattaaccctgaagtaacataagccctgttcttagcattcatattttaaacctaatagggatgcatagaaggtctttttgggtggggtctctcgtgaactccttattaaattttgattatgcctaaccgtatttgttcttgtatttgcctttgaggttggttgtagaggaaagtaatgaatgtgggcttagagcaatgaacacatccagccttgctctaactgtactcttcattccctctccaccagaaaactcttggaaggcgaagagaccaggctcagtttcaccagcgtgggtagcataaccagcggctactctcagagctcgcaggtcttcggccgttctgcttacagtggcttgcagagcagctcctacttgatgtctgctcgctctttcccagcctactataccagccacgtccaggaagagcagacagaggtcgaggagaccattgaggctacgaaagctgaggaggccaaggatgagcccccctctgaaggagaagcagaagaggaggagaaggagaaagaggagggagaggaagaggaaggcgctgaggaggaagaaggtatgaaaagcattaaaaaaaaaccctttcagaatctctattgcaaattggctgtggatttttattgggagatccatgacctatgcaggctttgcttatctaaattctatgtgagctttgcagtcataaacagtgcacatttaacgagaacacacacgtttagtaagcacagatggtaaattataaaacgttcatgtacactcatttaacacagtggtttggtacccaaaggaacatttgatgttggccaaaagacaaagagttgattgcgccctaaagaacatcagtgccagacatatgaaattactgagggcagctcttggagaggagatgagcttccagtacctggaagcaacctccttttacatatcctttaggagagtggggccaagaagtttttagacacagtctgacaatagtgattattagcccacaaagcctcagtagaaatggtttgcctagacctaccctggagttttgtattttctttttatgttcaagctgccaaggatgagtctgaagacacaaaagaagaagaagaaggtggtgagggtgaggaggaagacaccaaagaatctgaagaggaagagaagaaagaggagagtgctggagaggagcaggtggctaagaagaaagattgagccctattcccaactattccaggaaaagttctccccaatcaggtcaacctcatcaccaaccaaccagttgagttccagatcctatacaaattaagaagtcaatacatgtataattctgagatgacttaggttggactttcaatgttgtgctatgaatttcctccttacgcagagtatctgtttgcttgcagagtggctttctggcttgctgccagcctgtgcatggtccatgcttatgagttcaggatctatggcaatgtgaatcacacagatgtttacaataataataaaaaaaaaa

SEQ ID NO: 80 - DNA, 6178 bp, Pan troglodytes
tacacataacctagcctatttatttgtatctaaaatcccctagccgcaccatcaccgtaaacaccaagggaaataattaaggaggttcctggtgggaaaagggcgagttggggggacagggtgtctgcgaggtgacgggatacagaaaactagggtgtcaaaagggagcaagaatctgttttggggacaacttaaggatccaagtgtcaaggggtctgggcgatgcaggacgggaggggctgcgtgagtgagtacagaagggaaatgagtgagggggcatgggatctcagagaaaatcagggccctctgagcaaagtggaaaggacgaccgccgcagctcctcgggccgtagctcgaccccgccttcccttttgcgcagaatcctcgccttggctgcagcagcgcgctgcccccactggccggcgcgccgtgatcgatcgcaggctgcgtcaggagcctcccggcgtataaataggggtggcagaacggcgccgagccgcacacagccatccatcctcccccttccctctctcccctgtcctctctctccgggctcccaccgccgccgcgggccggggagccaccggccgccaccatgagttccttcagctacgagccgtactactcgacctcctacaagcggcgctacgtggagacgccccgggtgcacatctccagcgtgcgcagcggctacagcaccgcacgctcagcttactccagctactcggcgccggtgtcttcctcgctgtccgtgcgccgcagctactcctccagctctggatcgttgatgcccagtctggagaacctcgacctgagccaggtagccgccatcagcaacgacctcaagtccatccgcacgcaggagaaggcgcagctccaggacctcaatgaccgcttcgccagcttcatcgagcgcgtgcacgagctggagcagcagaacaaggtcctggaagccgagctgctggtgctgcgccagaagcactccgagccatcccgcttccgggcgctgtacgagcaggagatccgcgacctgcgcctggcggcagaagatgccaccaacgagaagcaggcgctccagggcgagcgcgaagggctggaggagaccctgcgcaacctgcaggcgcgctatgaagaggaggtgctgagccgcgaggacgccgagggccggctgatggaagcgcgcaaaggcgccgacgaggcggcgctcgctcgcgccgagctcgagaagcgcatcgacagcttgatggacgaaatctcttttctgaagaaagtgcacgaagaggagatcgccgaactgcaggcgcagatccagtacgcgcagatctccgtggagatggacgtgaccaagcccgacctttccgccgcgctcaaggacatccgcgcgcagtacgagaagctggccgccaagaacatgcagaacgctgaggaatggttcaagagccgcttcaccgtgctgaccgagagcgccgccaagaacaccgacgccgtgcgcgccgccaaggacgaggtgtccgagagccgtcgtctgctcaaggccaagaccctggaaatcgaagcatgccggggcatgaacgaagcgctggagaagcagctgcaggagctggaggacaagcagaacgccgacatcagcgctatgcaggtgcggcacggccagaaacacaggggggctcccactggagcaagggggggagttggtgcgcccagaaagtggagaccaggggtggtgcggctgcacgcagctcttagggatagggcttggctccttggccactgtgtgggaggggtggggcacttgaagggcgtgagtgcgggcgcgactgtagtctgggagtgtgctcggtgctactgcaccggcgttccgcattaaagctgcccagcccttgttgggtgggggagggaagacgtgggaactgggcgttgcctccggcctgcagtgagatcagctctctactgacctgcattaaccacaagttactttgcagcaactatcggatcatctagttaataaatagtagagtgaacaactctcaattaattctgaaagattactgtgaccagcaagctttatgactagttttaccaaccactcccttcctttatttagtaggtagacaggaaaatagtcaacattgttttaggtagttaactagtgatgttcatagtaaaccatttccttttacctttttttttcctttttttctttatgtgtaaaatcttctacaacatttctgtttaaacatctccatcttctggggagtagaaaaaatacaattttaaaaagatctccattttaaaagatctccatcttctggggagtagaaatttttttcttcttctggggagtagaaaaaataatttagatacatgggaaatattttatagaaaatatttttttttcttttttttgtttacatctggctattttcttctcataaagaaaggcattagtttcctggcatgtaacccagctaaagaagagttaatcagtgaatgagagacacagtttttctatcaacttagtttgtttgcaggcattttatgatgatcattaaacagtattaagtaaagaaacagaagaacagaattttcgtccatcttttttttcatctcaggcttcatgaacttgggtattttaggcatgaaggtttttcaaaagatacaggaagttattctaggagagattttatcaaaggtgcgcaccttgattttaatcgaaactaggcctttgcaactacactacagtaaaataatagaagggatttatgcccggctttttttttgttttatttttgtcttcaaacaggacacgatcaacaaattagaaaatgaattgaggaccacaaagagtgaaatggcacgatacctaaaagaataccaagacctcctcaacgtgaagatggctttggatattgagattgcagcttacaggtgaaaatagaggggcaaagacagcagccattaaaccttaggaagaaaatcagatcccatttaaagttatgttggatcagaaaccttcaataatagtccttttgaaataatgaagtgttagtttttggcttcttccaagaagaaggtatttagatatataagaatttaaccctgtaattaggagtcctgtttttatcttgtcattacactttaaatctaataggatgatttatttatattttttctggtctccatcaaaagatccccaggcattaagtattgataaatcccagccctgctcctgcttgcctttgtgtttagggtactcagagcaagttgtgaaacacaggtgttttttaacctcaccttgcatctgcatccccaggaaactcttggaaggcgaggagacccgactcagtttcaccagcgtgggaagcataaccagtggctattcccagagctcccaggtctttggccgatctgcctacggcggtttacagaccagctcctatctgatgtccacccgctccttcccgtcctactacaccagccatgtccaagaggagcagatcgaagtggaggaaaccattgaggctgccaaggctgaggaagccaaggatgagcccccctctgaaggtgaagccgaggaggaggagaaggacaaggaagaggccgaggaagaggaggcagctgaagaggaagaaggtatgataagaaaaaacccctgcaacttcaagtgtaaactgggtgtggagatttgttaggaggtggataagacaaatgaagccttgctcatttattcatatatgacattagaatcataaataaattttctgtttgtttagcaaaactttcctaaggcatctactctgaatgaggtgattggtcaaaattttcattttttaatataatcatttaacacagcaggttggtgtcctaaagaacaaaaatagataccagacacataatgaaagaaatattgaggttaagtcttggagaggagcagagcttcccatacctagaagtgatctcattcgatttaaatatgtgttcagtggcaaattattcatggcaagctttgtctgttacatgtgcttttggagagagtggagctgggaggttttggtgagcattctgacagtcgtgtttgcaaataaaacctttgcagacatgttttgactggacttaccctggatttggattttgtacattttctttttatgttaaagctgccaaggaagagtctgaagaagcaaaagaagaagaagaaggaggtgaaggtgaagaaggagaggaaaccaaagaagctgaagaggaggagaagaaagttgaaggtgctggggaggaacaagcagctaagaagaaagattgaacccccatttccttaattatttcaggaataattctcccaaaatcaggtcaaccccatcaccaaccaaccaaccagttgagttccagattctatgtgaattaaaaagtcaatatatgtataattctgagatgacttaggttggacattcaatgttgtgctatgaatttcctctttatgcagagtatctgtttgcttgcagagtggctttctggcttgctgccagcctgtgcatggtccacgcttatgagttcaggatctacggcaatgtgaatcattcagatgtttacaataaaaaacaccacatgagtaaatgaattcactaatgttaatgttaaacttcatggaaaaatagtcctttgaaccttcggtggttagcaattaaagaccctgagttatgtgcaataaatagtaaataaagttataccgaatgatgtattttttgctgtggttgttacttaattaaaataccttaaagatggcaccaatataaagtatataccagtggactattgacctccaattttttaaaaagttgaaattttaacaactaccaatacttttttttcttccttcaattggaaattctgagggatacagttatgtcgtgattactcgtgaaatctctccccacaaaaattttactgataataaacatgagtaaatgagaaagtctgtaaataacaatagactttgcctcataacacgtgttgtgttaggttttgggatggctttctagggagcatttctgaaattacttgacagatacactctttatggtaaacaggtcatttcagagtctagagtgctaaccattacactatggaaccatgataaataggtcgtttcaaactgatatgtcacaatgcaatatggatagaatatggatcccatacattcgtccctataactgcattttaaaatatagtctaaatatcatgggaggaggttaaaacctgagaacatggtacaataagaaggaataatttttatatataattttttatctatatataatttcaggagaagggattaaaactaccaaaggttatttgccactccactgcaaacatgttgcctgcaatcctgagctcatgatttagtgtgttgttaagcgtaattctgttgcctcaagtaaataccacttaatgctacacatttttaaacctttaaaagctacagacacaagtaatgaaattatgagtcacttaaggggggaggtaatatgcttgtatgttacattgacattgctctgcatgtctctactgggaaatatttggatttcaatgatagcttgactggttggacattgcatcaaatacacgccccatgtatcctttctgtctgttgtaaagttaagaacgctcttgcacttgcatttgatgtggaataaatatagatgatattactatctgctattctgcctttgttctgaaacaattgctttgtcagctaatttcattcaatatttgttttttagacgatctttataagttattaatttaacctgaaaccaaagtggtctccatttaaagttacttaatccctttgtaccacctatttctagttaaatatatgttgctatgcaaataggtaaagtgcttccttgccatgatggtaatggattggaactatgaaggctctcagtgtattggcttctgtaaagatgaggcgtctcctcagaaacaaagcttttcacatttctgcttactagacctgggatgatgtacatggcaagtctcaaacagatgcaagctacgtgcaaaaagtaactttagccaaatggaaatagctggatgctttgagaattacttggttgaagtaagaaaactgtaccatcctctatcctgtgtgccataataaaatagtaaaaaacctaaa

SEQ ID NO: 81 - DNA, 191314 bp, Human
agtcgactcaaccaccggagtggcccctgcagttggatagcaacgagaatcctccaggggtgcagggcgacggcttcggccgcaccgcgggctagccagggctgcgtgcccgcctctgaccctcagcagaggtgtctctggccaggaggagctgaagttctgcaggacattggtccgcccgcggacagtccactccgcggggactttctctggataaggagtgcgtgcgagtggctcccaggcagacagggtgtctagaaggctacacgctagggaaggtggctccttggatttaaagaggaggaaaggagggggcatctaaactaggctttggagagaactaatgggaggggcgcccggggtgggggggcgggctggaaaacagaggggacagccaggactggtgttgggtgtcagggaacagacggagcggactgcgtgggtccagccaaggaaagtgaagcaagcagacttgtttgggtcaaggttgcctagggaagcggagcacttaagtgcctctttttccccttctccagcctcctccacagtggtgaggtcacagccccttggagccctccctcttcccacccctcccgctcccgggtctcctttggcctggggtaacccgaggtgcagagctgagaatgaggcgatttcggaggatggagaaatagccccgagtcccgtggaaaatgaggccggcggacttgctgcagctggtgctgctgctcgacctgcccagggacctgggcggaatggggtgttcgtctccaccctgcgagtgccatcaggaggaggacttcagagtcacctgcaaggatattcaacgcatccccagcttaccgcccagtacgcagactctgtgagtacccgggagagatcagggtaggacccagagatcaagggcatctgcagaggtggcccgaagtgcacaaaagcagctcaataacagcccgaagtagtgtgtgagtgtgtgtatgtgtgagtgaatgtctgtgtgtgtagatgtgtgtgtgtgctaaaaacttaatcgcccacacttgggaaggtatcattgttgacatcctcattcccaacacaggaaaatgttacaaaactttggtgtacaatgaccgtgagagctgttctttccaacaagctgctattcagcactttgcctaaccctggttgaatctgttttatttgaattaataaggataatggcatctcaggaactgacctttttgatcttaccttgggtaataaaaaattgcaaaaatatgtatttctcctttttgtttctctagatgggaggttatcttagcagttctgctgattcatcaaattgttgacaaaggtttaagcaggggccctttttaaaatgaactgtctatacagtatctgtaagttacttactcaaatgtgaactgccagtgaaatagtacgtccagaaccctgctttgtgatagaggtataaagaaatgaaatttcataaaagtatagtacatttatctgcatgttaaatgttaccagattagaaacctgatgttaaataagattatacacacacaacctgtttcttaacagcaatttaaatcagtgatcattgaaattgtagacaaaaccaagggaataaagtctgtcttgattagttaaaaagagaacagaaagaaaggacagtaaaacaacctaggctggttaaatccagttaagataaaaaaaaatgcaggttattaaagaaaatgttgatagatgaaaagaaatgggaaagttgcacctctagattttctcaagaatttagctcatgaagactatttaacagtagatgaatatttgagcacagagatatatttctgtgctcagagatatcctagtgtcttagcacacctgaattaattagttcaataacctccaaacagtgtggtagtcattctccatgctgccaccacagaataagatgtgtaaaaggtgtaatggcctcttgattacacctctacataggttgcttgtcacctctagaataaaattcttttgtgcagcctaccagatctttcaagacctagtcaagtctttccaacctcattgctcctcatttctctaacttccccctcctgctgagaacttctggcacttccccaaaggtccctgctgttacagctgcccttgcctttcttcccactttctggcccctctgcctgaagcacatttcacccatttcttcacccagctaatgcctactcccagatccagatcctggatcaaccctgcaggaagcttctcctgacccatgaccttcaggctgggtaagctataccccccttcccaacagcgttctctgcatgaacctaaccctagcccttagacattgtctactttcttgtaacttgttatttatttgcatgcccactcaagcaggacacaagcttctctaacatagggaactgccattcaaccccgaattcctgaaaccctggaactacttagacactcagaaaaaacaaaaaaaaaaaaacttaagtgaataaataaacaaatgaatatgccaggtctctgaatgtccactctatgttggggagaaagaaatccaaagacatcacttcttcagagacttctttaacagtggcagaaattcaagtcattgaagagagatgtggctctgacagtgaaaaggaactcgtagacatcctgtttaaaattccaccaaaagttgagaaagaaagggtaatggagaatgagcaatggaacaggagtcaggaaaccagcattctctttagcccttctttactaaccatgaaattgtgtaagatgactgatttggaaggagccaaatttccttctgggtaaaagagaatgttcaactaggtgctttctaggtgatgacatgatgctgatgagaatagtctgagggaaggcactgaatcacaagaaaaagacataaagacagtggcaaggaggatctgcccttgagaataatggagagggaggtagtatgtcctgaagaataaagttattctgagatcgaaaagagaaacctgataaaaagtgtgggtaaaacaaaatggtagtctcctttgaacaatggctactaccatctgcaacagtagaaaaatgatttttaaatcttttgggggcggtagaactctttgttgaagaaaagcatatgagagaagtaaaacatgtaaagctaacaattatattgtgtttacttacgggggcggggggtcctgttctcagcgctttgcatgaactcacccagtgaatcctcaccaaatccaattaagtaggtgatgttattatgctcattttatagatgaggaccttgaggcacaaaaataaaatgaagtaatttgctcaatgttgcacagcttgtaagtggtaaagtcaggatttgaatatcatatcatcaactatggagcctgcacccttaagccaccactctcagatgagaagtgtgtctcaccacaccagtgttcccctgatggtcataggctttggagaaaaaagtctgaaaacaagtcacattcagtaaaccgactgataacctcgggggctattcatcagatgcaagaactcagaaagcaggaggttagcagggaaaggaaagaagaaggaaggaagaaagagagagtggaagagaggcaaggaggacaagaaagactaagttagtctttcttgacaagaaaatctagatctttttttacatctttctagacaagaaagatctaagttatggaaggtattccttgctgaaataaaccaagtttttgtcattaaaaagccgttctgggtggtgacctctttttggaatctacttaaattatacaggatctactactgaggcatgttctctcacaagttttgtattattcagagtgtacctctttttaaagtttttgaagagcttacactggtttaaaatgtaaggtattttgttcctgtagagttatttgcattacttctgcaaccttcattaagatgctgtataaccacttcttagacattttacaaattatgatggtgccgagaacaactctttctaaactttatcttctactcatagattattgttctgaaaggtaaacagctctcttgccctactacccatatcccagccccgtggtcttatggatgcaggggagagagttacggactgtggccctcactgaagaagtgatgctgtatcttttcctcactcctcccctccagaagggtatgatgctttacctgagtggaaggtgagggagagctgggatccctacttcccccactgccagtggaacattctagaatctttgatgtgtaggtagtttgaaaaaaatcactctcttccattgaaaattactgatttaaggaaacttaaatgaagcaagagaataaaattaaaaatttaaatgttggcatataattatagatcatatatctcaaaaccaaggataacaagattgacccatcaccctctcttactcagaaagttgccatttgttgcctctgtgcatgagaagatccttccttctctgaataaggaggtagaaaggatttgacaaccattctgcaccactctatgtatttgtgtggattcttcctccagaaagtgctggcacgccttactgtgttgttttaaccctgctttcagtttcattatgacagtaactgctacatctgccttctccaaccccactgccatctgtggtcttgggtttcgacgaagtaagtggtttggacacctgtgtgccttcagatatgtttctgaaggagctgttgttttcaggttctgtttttactcatttgcattctgcatctgtggctctaattgatggactctcctactgtttactaaactgaagacaatcattcatcatctttggcatttgtaccctgtgttccatctgtgctgttatttactcagtatttttaagttgactcgcttctctaactgaaatttatttagaaaggttacaagtggaaaattagcatgacttcgtacaaataagaggtaaccagaaaactaaagacagaaaaaacaaaaatataattaaattctagctacagactattgtctgtgaatacactgagcctacagctgccttctctttgttaaaaaggaagcaaagtaagtgttaataagtattaaagagataacaatctggcacggtgtccttggtagtatcgaaaggatggaaagacaatagagaaaggaattactttctcactgtgtgattcacggttatttaatgccaggtgggcactccacctaaaataatctcacgtacctccaagtcatctttgttccacacttaaagaaatgtggatgttttgtatatttcacaatggttttagtcacaatcagtggttgtaatctgaataacaattgtttccaagctaaagagaagccccctgcttcaacacccacgtgctccccaaacacagccccacacatataaaggtgacttcatttcatatatccaggctctgtgaattattcttttccattctctctctcctctcccatacatatgaaacactgttctaagaggagtgaagaattctgacctgaaagttaaagggatttgatttattcacttggaatgaacataataatgaacaataaaatgtgtccatcatatatatatgagagagaatatatagagagagggaatatatctgtatacctatgtgtatatatatttagacagatatatatgtgtgtatttaaatcagtcaaggtttctgatgataagtaacagaaaaccaactctgtttaggttaaggaagaaaaaaaatattttgaaagaacatgtaatttacagaattactgtaggaccaggctttgaaaataggccaaggcctactgtgggcaaggaactggagccacagtgaatcatctgtttaggacaattccatgggcaatatagaaaccacagccactggacatctgcggtcttgtagctgccagactgtctatgtgctgccatcaataatttcccaactgtccctgtctctttaaatatcctacctgggagtagtatcctgtatgggagcatttgattggctggcaagccatagctgctggaggtaggaagagaaaggtggtcacccgcccacttttggcgtctgaaataggagacgcagaactgggtccttctaatattccacacaacaggggattccccactgaagaggggccatatgccctctacattgctcattacttccttcattctgcaaatctttactaaggactaactatatcccagacactgtgtcacactctggacttaatggagaacaccaccaacacgtccctgtctgcagggatcttacagtctagtgtgggagctgcatattaatcaaataattacataaacacagagttataattgtataagtgtgcttgagtatgctctttgtaggggtgagggatatttacttaaactgaggttcagcgaaggctttgagctacctcctgaagaaccagtaggagttgagtgtaagaagtttcagtggagcaggtagaaggtggagatgtggtgttcaagagctttgaagaattctgacctgaaagctgaaggggtttgatttattcacttgggatgaacatattaatggacaataaaatttgttactactcccttcataactcagtacaggttgaggtgaattctgatgtccttgggagcagtttctatgcacacacaaaaaaaacagttaatgggggtagctggcttcgtaaattaatatttggtttgttaaagaaataaatgtaaaacctagttctttattgagttttctatgtatttattattttgtttggaaatctaatcgtaacaattactttgaggagtattttatcatttaatattttaataactgatttcccatatagtttaatcaaataataaataatttaaatgaaaacaaatttaatgtattttattttaaagtacttgaatgcttgatgaaaccttcccaatccttagaaaatttgaaaacatctattatattaaactttataagtaccaggaatcctatgtttttagattgccaaactctggagtgagatcctccgggttgaatgccttggtctgctatttcctaaatatgctttgggaacattgcttagttcctctgggcctcagtttctccatctataaaaaaagagtaataataggccctgactcaccagattcctgggtggtatgaatgagttaatactgtcaacagataattttcaaagaaaggaaaaattgtaactttcatacacctataaattgaacacatgttaaagattttaatgaactcattgatgagtgtatatgaattgcctaagattgccataacaaagtaccacaaactgagtggcttaaaacaacagaaatttactctctcacagttctggaagctaaaagttggaaatcaaggtattggcagggtcatgcttcctctgaaggctcttgggacaaatcctttctggctcttcctaggggctggttgctgttggcaatccatggcattccctgcatcactccaattattggttttaggctcaccctcattcactatggactcaacttaactcattacatctacaaacattgtatttccaagtaaagtcacattttgtggttccaggtagatatgaattttgggggcatgctttaacccaccataatgaagaacctggtaagatattacaactggcttaaagggtagcccaccaactagacatatttataaattaggaatatcagagtgactatgcagatggaggccaaactagcttcttccctagtcagggagggaagttcatagaagctcttccatacgggacagaatttacaatccgtagacaaaattgttttgcattgctacaattatctacaatctagaaaggtgtaaaataattcccatagaatcagactgagaaacttggaagggtgtgctctagtcaattcacagcttttcattgaaacacatttttccccagtaatacatgcaaaattatagaaaagttaccacctcccagtgagcactatacaagtaaacttattaaaacctctaatttccttttcaacttaaatcacaagtcaaaataaattactcaattatacattttaaattggaatagcaagaccaatctattagatatcccaagtaggtcaacaacttctgttaatacaaatactcaaaataccaaatatatattgattattcttaaactcaacacaaacatattaatactatgggtctgatttagattctcatttctattgttaactctaaattttcccaagctaaaaaatgtttattaattttaaaaattgatcttcatcccctaatgaactccaggttctttatggaaccatccactggtttccaggttccatatagttagggttgccctatccaaatggaccctcctcttacacctgtaaggcagaaaatatcttttctttacccatcacatggtgcatggctgagaccctacaacaacaacaaaaaacagattgacaagaaaaaaaacattaaacaactattaaatataagttttacatgacacaggaggcttcagtaataaagacccaaaggaacagagaaaactgtatctttttatggacagtcatacagattggaggacaaaaggatatgatcgaatggtaataaactgtggtctgtggggcagatcttagcaagtcttatttgttcaaattcatcttgatgtctttgtgtcttcattccttttctcctggtgtagggagagcccctctgaaatgagggtcttaagacctactttagaggaagaccagagaattgtctgatgacctgactcaggggagaagggcaggaaaaagtcggagagaccttctgcttctgttgttttctcaaatgccaaggtgtcacatttggggatagaatgtcttgaaccccattacatctgtcattcaagtgtagttaatagcattcctttcactctcaaaggtgtcccaatttgggggataaattgctaatactaatagatcttcctattagaccatgaagtccagaggcccgtgggacatgctcagccttgtgtttcattgccgtaggtgggagtctatcacttaaaagaaggttggtctcagccaggtggggtggctcacgcctgtaatctcagcactttgagaggcggagcgggggcggatcacgaggtcaggagatcgagaccatcctggctaacacggtgaaacccagtgtttaaaagtccaacctcaacaatcagatcagttttgatgaggccaagaccattcagacatgatatcagaggcatagatccagaatgtccagttattttcatctgtgtgaacaaattagctatcctggggcctaagtctattctcttagatcacctctgatgaagtagtaagcatagaaaactaattcgtaatacataaaacatattgttaaatgaattagttttgtctgaatttatcagtcaatttactagagtagtagttttttgtccagagctgagaaattaagttgaattgatctatttgattatttcagtgtttcctggttatacaaagtgtgtttgttacccttcagactaaggtttattagacaaaagttcatgggcctccaggagttcatggttgtgctcttaggaatctgtggttgtgtgaaaatttgtccccatcagtgcatttctgagactctataactttccttagatcttcaaaggtgtccttgacccctcacaagttaagaaattctgctttggaataatttggcattttgtaagtgtactcactatgactcaatctttttattatattacaaacaaccctaacagacatattttaacaataaatgaaaatcgcctgacctttgtgtggcaagctgtcacagttagttactacttgagactgtcatttcaacagttactactgttactacttgagaccgtcactaggacagttactactgttactacttgagaccatcattgtgagaatgaacaaaggaatgaacgtagaaatgaaaaagtaagacgaaactgttttaaagaaagtgtccaggggaagaagaagagagctccctgcttctagtgagcaaaggcagcccctgagcttccacagccctttgtatttattgggtagcaagggcagggaggaggaggtaacgattggtcggctgcttaattgatcatgggttcatattgttactaacaggcttcagatgtacctaattacaagcaacactgcgcttggggtgtgactgccctcagcattccttctgggtggaggacgcacttttgtcagtttgccaacattctgcatttatgagaacagtttgctgtttactcatagagcctccagtggtatagtgagttgatcacgaccctcactctttcagcctgcaacacctttgaatgtcatggttttccttctgaacatgttattgtggtgattactttcttcatggctcacacttagcctgtcccttgataggctcttcacacagaagttcactgaatgttgccactttttcaagtcaatagttgacagattttttcaagtttctaatgcctcctacatgatggtaaattcttcatactgactctgtttccatttttactgaagctggtcaacatacttaattactctctttcattacattaattaaaaaatagcatttgaaaattttaagaatgagcaaaatggtcccatttgttcaaaattatagattgagttttaaagtgttccatttagatatcagaccctacttacttggcttcatttctgtatgaacctttaagaacatttagggtattccagaaattttcaaaataattttttaattacaaagttggcacttgtgatttttaagacatcttataaatattgttctcttatatgtggtgacaggtatatgtgctctggatttttatagcacagtcccactgaaaagactgccatcagaatgttccagaaattcaaatatttcatcatccttttaatctaaacttcccacatcacttgcacacctggaaagagcttccttatgtccaaatttttctttcagaaaacatgatctctgtatttatatgacacatgaagcttttggcttatattttgtaggcattaacttaatcttacccatgcctgtgtgttctcataattatgcaactccagcgaggagactgaaattgtttcctcttattgccaggtactgtcactttatattttgttatttcaatctttttttaagccaagaaactagaaggctacttttaggaaagggctctgtgcatgaaaataaagaggatctaaggacgggcataaatgagatactcttccatgagaaagtctttagtgggctttgagatggcagtatttccatctcaacacccttggcagttatttctgggtttgtggacatgatccaaagatttgagatgaccagaaatactacctctagataggtggcattttattgtaaaatgttcttccttctttccttttttatattttaaataaatatgtattgatcacctatcatacactagtactattctaggcattgatatataataaacgacctcattgattttacatcataacaggagaaaatagcaaaaaaaaaaataaaaatttaaaaatttaaaaaagtaaaacagagaatgtcagatggtgaaaagtataatggagaaatataaatgaaggaagagggagaaggaatactggaagttgcattttaaatagtcagcaaggtgtcttagtttgggatcctctaacagaataccacagactgagtggcttacacaataaccatttacttctcacagttctggagactggaagtccaagatgagggtgccggcagatctgttgtcttgtgagggctgcttcctggtttgcacttgaccaccttctcattgtatcttcacatagcaaaaagccaagctcacctctcttgtgttttttattataagggcactaattttgtcataagggttccacactcataaacgaatttcctcccaaaagccccatcttctaatactatcacatcagagattaggatttcagcatatgaatttgggggacacacaaacattcagtccataacagaagccctcactgagaaaatgacatttgaataaggacctgaagaagctaaaaaaggaatccaggctaatatctggaggagaaaaaaaaattatatatatatatgtatgtgtatatatatatatatatatatgcttatttttggaatgagataagaagctattaaggattttgagccacacacacacacaagcaagacctgacttacattttttttttttttttttttgagacagagtctcactctgttgcccaggctacagtgcagtggtgtgatctcgactctctgcaacctgcacctccggattcaagcagttctcctgcctcagcctccctagaagctgggattacaagcatgtgccaccatacctggattatttttgtatttttagtatagatgggttttcaccatgttggtcaggctgatctcgaactcctgacctcaggggatctggccgcctcggcctcccaaaatgctgggattacaagtgtaagccaccccgcccggccctgacctgacttacattttagtaggatcaccctagctactatgtttcttaatcgggtgagagatgatactggcttgaaccagcttaattgcagggaatgtggtaagaaatttcctgggcttattttggaggtgaatccaacaggattttctagcggactatgtggactttgagtaaaagagaggagtcagtgatatcttagtctgaattctccagaaagcagagcccatgtgagaattcttgttggggagtatgatcccaggagcagaaggtaggatggggaagtgaagcagggagagagggagagtttgctgctgctagaaacaaatggttgctgaaacccctgagaccacctgagaattcagatgacttgcatctcaggacccttgctttaggaaggaggaaaggtaaaacatctatccatcagttcttggctcccatgagtcagggatttaattctactgaccttccaggtttcctgtgcctgggtgatgaaagaatttcctgatattaacaaaaaagtccccaggtgggagatgagaggtgtgtggtacagggctgagatgcagtactgtcgagttgtacctgcctgaagctagtcagagctcatacagaactggtagctgcagcagggctagcataagaggcaagctgagagaatctaaaatgatgtaaaacaggtacccagggttggttagcctttgcacaactcagacctgcccaagcttttcattatgtctagctcccataataaaatatagggcctccgattttgtaagaatgagatgtccttactttttttttttttattcttacaagaaaggggaatacaagccccatcttccacagattccttcaagatgcagtccttgcaaagacataatgcaagagggtttgggaaataaactagtctgccctgctgcagctgatcttaaggatgccattgatagtccttatctctctttgactccaatcctagatttgtctcacccttgcccagcactctgactggttgagttgattgcctgatggaaagacccagacttcagctccaagggttctgaaagcttagttgccttgttcttgtcatatatagctgctgtattttctccttcaccattatctgtgggctcaaaagaaccaagagatgccccagtgaattccctgcattctagacacactccttactcttcctaatgtgtagcagctgccctagcttctcatggtaaagagggcctaatatttctcaatagagaaactcctttatttacctatttgtcctctagcatgagaagctcaaatgaccaggtggtcattatagtatcaacctccctgtattggaggaggaagaagtaatctttctcctcaggaactagtaccattaattgggcaggaatacagacaggaagctcaaaatttgaatgttaggttactagggtgatggtgagatgagccaattctatcattgcccccgggttttcagacatgtgtatcctagctacatagaacacaatagcatatgttggctattgattcagctcatatcctttcttagatcagatccccaatcctgcagggctttgtccccaagatggcaccttagctgagtctttaattcattccaccattctcgtaggcagtctggttcttcatgacagggcacatagtgagactagtggatatagtgttcatatgccctttgttgcaccttctctgccatgaaatgcatcccttggttgaggcaatgctgtacacgttttcatactggtagatcaggtattttataaacccttaaatggtggtgccggtggaggcattgaagtcagagaaggccaaatccaaagtaatcatgaggttttaaatgaattactatttcttacagggtggaaatggtccagtataatcaaactgccaccaaatgactggctgttctctttaaagaaatgtgccttaccaagggtgcagcaatgggctatactgctgaaaggttggtcatttacaggagaagtatcttgattagacttgatgaaaaggagcccaagccattgggtccatgcttggcttccattcctgtcaccatgaccacttcattcatgttcatttctccaaaactggatggcatttataaaatgagtcatctagtctacctgggtgttgagattcaccgcaaaccagagtaatcagtggatactctctgatgagcattaacgtgagacacaaaggtccacagaatttgttcccacccccatagatatagccatatttgtttcctagactttcttgttctctgttttccaatagtattctttctaggccagtggtcaaccaggtaaattacttgctacttcttggtattccatgtatacccttgccacggttctttctcccttcatacaaaaagaatgattgctataatgctcacagatgaactgactgtgaagatttcccttcaccactatcctttagggccacccttgagtggggctgtaatgcagcagtagttcattttttttggctggcattagcttgtgccaatctgtaaagcagacaccaacctatgaactccatcaagtggtcatatggagctctccatgaagccaatttcagtgagagtgcagcagaaataagtgaagtgggagtctaggccacctattcatgaatttaccttccctttctagactttcttgatccagaatgtaaaatttctatcataaaatcaattgctgctgtgctcaccttattttatgtagtagaactggcaatacccaattcacaatgggcagctgtagtcacagagtcacttagtgtcccattgaagagatctcagtctctactagggcagaatagcatgtcaggaattattttcctcataaagggtatttctgtccttcagaaggcagatccttgctccaaaactttaagagcctgagctttcattctcttcttgggacctgctggcgagtccacagaatatccttgtccaggatggatatctgtagtgttgtaagacctgctgggctgggctgtatggcccacatggcagggaagctggcatttcagcctgaatctgttatagactcttgtaggtcctacctgaaactggcagccttctgagttatctgataaatgggaaaatgggttacactgctgccaaaagccaagacgcccagcaagtgctgtacttctttgtaaaaggtagaaagggcaagatacaactgtatgtcctataccttagaagggatttttttgtgagacagggtctcactctgtcacccagactgcagtgcagcagtagttcattttttggctggcattagcttggcttgtggcaacctctgcctccaaggcccaagcaattaccctgcctcagcctcccaagtagctgggattacaggcacatgccactactgcccggctaatttttgtatttttagtagagacgggtggccaggttggtcttgaactcctgacctcaaatgacccacccacctcggcctcccaaagtgctgggattacaagcgtgagccaccatacctggccagaagggattttttagaatgccgcagactaagcatgttgctaatggaagaggtccctgaatctttgtgggatttatctgctgcccccaaccttcagatttcttactagactagctaggcttctttctactttttgcccaccaactctaattagcatatcatcaggtagcagaccagtatgatgatgtgcgtgatgtccagattatccgtccccacaaactcttatgaaatggaaccccttgggcaaagcagtgaattggtattgctattgttcctagataaaggtttactacttttgattctctctattgataggaatcaagaagagaacacattcaccagattgataatcacatataaagtgctacaggctgtgctgatgtgttccagtgaagacatatctggcacagcagctatgatagaacctacctattggttaagtttgttaaagtgcattgtcattcaccttaatctatttgtttggggtttttgttggttttgtttcttacagggggcagataggtgaattgaaaggatatgaagcaccaccattctgcatcctttaagtctttcaagttgacactaatatctgcaatttatccttggacatactcctgtcagtataagctcaaaccttgtatccaatgatcttcaagaagccttggatttctgtttaccagttgacagttactttggcaactggccacaggtcccttttaggaatgattgggggacagtcaccaataatacttgtagtggtatacactttccctacacttccctagggggatccagcaacacttttaatcaatgaattcctggttcctgagacattaaagttttaaaatatgtgcctcttaagatgatgaaatatagtaacttgatgtggttactatacacagtactagagggaagaattttccataacacaaatgtttagatttaaattcatgccttgaagccagataaatgaagtataagctataattacaaaacacctagttcttcagtgtttggatttatgaaaattgccatgattgttatctattgtgagttattaatccaagttacttttattacattttaacagttttagctataacataaattccatgggttttcgtttttgttttttgtactaccttaaaaaaacctatcattgttctgtggggttttttttgctcagttatgtgtttgtatcagctttatgcccagacccatactatatgtcttcacatataatatctcagtgttcacagtggtcttccttgggaggtgtttgactctcatttagatgcaaaactgagacccagaaatgtcatcttttttgacttttatgtcacagctggtaagtgaaagagtcagaattcaaattcatgtctcccaactctaaacccaaagctccttctactattccatagctatcttcctaaatctggtctattttctctccctctccctcccctcctcctctctcagttgatgtgaaattcacacaatataaaattaaccattttcaagtataactaccattcagtggcatttagtacattcacaatagtgtacagccagcacctgtatctagttccaaaatattttcatcatctcaaaggggagctcgtgccgattaagcagtcattccccattccccactcctcccagcccctggaaaccaggaatctgctctccgtccacatgggtctacctattctggatattttgtgtaaatggaatgctaccttatgtgacctttgtatctgactgctttcacttagcataatgctttcaagtttcatctaaattgtagggtgacaaagagtatgggcaatcagacaagtgacccaaagggaaaacagatgtaaacaggcctggctaaagcttgcagcaatttttggacaggttcatttctaacacatcaatgtagatagcagccccattccatgctgtaataccttataccttagatacaaaaatctgaacatcaaaaaaatctgcgtacttggccgggcgcggtggctcacgcctgtaatcccagcactttgggaggccgaggagggcggatcacgaggtcaggagatcgagaccatcctggctaacacagtgaaaccccgtctctactaaaaatacaaaaaattagccgggctaggtggcgggtgcctatagtcccagctactcgggaggctgaggcaggagaatggcgtgaaccccggggggcggagcctgcagtgagccgagatcgcgccactgcactcacgcccgggtgacagcgagacgctgtctcaaaaaaaaaaaaaaaaaaaaaaaaaatctgtgtacttattctcagaggcttagagctaccaaacatactttcccgtgtcgaaaggttttaagagttcccatcttgtgaaggaggctgtttctagccagttggcagaggaacactatgcatttatcccttctggatctcatggcaatcttaggcaacatttctagaaagcggcgacttaatagcaatgcatgaagccattattcataactcttttagagtcaatattcatgcaaagggcttttctctgttataaggaagctgaagaacaattctaacaatatcctatttctatcgatgtttcttataataatattggcttctatgcctttttttaaaatctccattaacaaatttaaccaatgtgccaaggaagaaaatttgctgtgaattggaaaatgtttaaatgagagacataaattattcttcaccttatgtttaccagagcttacttctcagttatttttccccaacctgctttagatgtggaggcagaagaggtgtggtataattcttatctcccaccatcgccctgggtgggagattctatttactcaattcacagggtgaacaaactagtaagatctgtaaaatctgctctccccacaatgagtgattatacggagctcatgagctaatgctggtagcatgatgtaacagaatacgccttgatcacaggttagctattattactaatgcggtggtaggtctgagagcctgtcagatgtggcctgatttaaccctcggtgtgagcattatatcaatttgtggagggcaagcttccatgcagggaccatccagcagctgtttggcatcagggttgcacagctttattaggaagagcaacacttgtctacttttcaaaggggacattttaaagacttccaagagttcttatcttcttccagatatattcattcccagtagggtaaagggactgaaagtctaactagggggtctctgtgccaatagagcacataaatctgtaagaatgatttatctgttctgtgtcagagtttggctgaaaatcctgttagtactgccaaaccctccagatgcccatatttaatgcttggttggccttatgtagcataaccaaattgccatttcacaaccaccctcaatccctggaatctaaaacaacaaagccagaagctctgaaatgtgctttatgaagcatgaaagaatcttttaaggctctgtctgattcatttctgtgtgatgatagaaggtctaatgtacttgtgaaggattccttttactcgtaagaaacttggcactttatagaaagtatgtatttcatgaccaaaaaaatagggtggcttggagggattgtgctttctttttgtattgtatccaatatgttcagtatcaacagcagcaaaataaagaggaaaaatatctggtataaagctatgtcagctaaaagtcacggtgaagagcagaggacagttttccactgaattcagggaaattattgcatgactatgtgaaaggactacttacacagtaagagtgctaagtagaaatggacagtggaagtcaggagaccttccataagtcctaagaatcttagcaaggcacataatcattctgtgtcttaccttttgtatctattaaaggaaaaccataagatggtcatgtcctatttcagagaactgttaggaagaccaaggacatcattgttcaaatgttcatggagctcttcctattcagggacaatcttccccattcagcagagtaagactatggcaggttattgtttgtcacatattttgaagaacacaaatgtattatacagggattctgaaagaacttgactattaaaacaaagcaacacaaatgaagtatttcatttaaaagaatctacacccatccttttcttctccacttttgtagcaatacaaaatgagtccctccacctacatccatgttcttttggtttcctcaccctattttgactttttcctccctctcctactctctcagatgcttttcacagctatctaaacacactcaagtatctttcctctaaaaaaatttcactccaatacgttctcacatttgcgtccacctaccactccttccctgcctctatccttcccttcacagctaaatgttcataaggagctttctcatgttgctcttctgatttttttactccccattcaccatttagcttggtgcaatctggcttttgcccccattacttaattgaaaaaggtcttgccaaagtcatattaacaacctttgttgcaaaatccaaaggacattttagattctttcctaagttgaatgctcagtagcttttgtcactgctgactgcttcccttggttttctccacatcatactccttgattgcctggtgccttacttcaggtcttctgagcagcacaggaggcagggctgctgttgcataatggggaggatactgagctggttaggtgtgccaactgcactccttgcagcttaacagcaaatgcattttttttttttttgagatggagtctcactctgttgcccaggctggagtgcagtggcacaatcttggctcactgcaagctccgcctcccgggttcacaccattctcctgcctcagcctcccgagtagctgggactacaggcacccgcaaccacgcccggctaattttttgtatttttactagagacggggtttcaccgtgttagccaggatggtctccatctcctgacctcgtgatccgcccgcctcggcctcccaaagtgctgggattacaggcgtgagcaagtacattcttaaacgaagccctcacttccacaacagccacagcccaccccttgcaagatacagatctggttctccacatacctttggggaacaggttatccaggattccagtgggcctgtcttcctgaggagaagcttgaaagaggtaacttagggagtagtctgacccctgttgcagcggttggtctgtctgggatcacaattggtacttatcatctctcttccactgttcattttaaattccccctcagctttcacctctgctggtcttgatgacttatctgctgatatgatcaaagccttcatttttgagggcctgaacccatagttaccatacttttcttaggctggggttattgcacttgtttgtctatagtcacaattgagcaagtatgtccaactggatcatctgagttccaaatatatttctccctgtcctcattgtgtaacagcagccctgcttcttcctcctgatcagggtcagttactcctaacaagatattgacttcttcagcctgctggtctctgtatacaagaagtcctgaatgcccaagtggcagtcatagcctgagttctccacagagcctagtattataggaagaggaaacacagactctttcagcgaatcattgaatgtgataagtggactctctcctgcttctgcccaatggttcccagaccaatatattcttcctaattgggataacatccatatagaggtttgtgatgcagtgtctagcctgcatgatgataccccaccatggcagatgccatgatgtaggcaattgcctacaaattggcattccggttgtgcctttggtaggctcttgcattgctctatagagctaccttctctggattatgtgatatgtgataaaaccagaggatcccatggtcacaggctcattcgtctcctcctctgtgaagtgtgtctctcatggtcggatgctgtgttatatggaattctatgtctgtggatcactttcaaatcctccagctagtagtgctgcctgggactttgtaggtaagaaaggcaaacagttatctagaataaatgtttactaccatgacaataattcacaggtccttccaggaagaaatggctcaatgtgtcataaagtggccatgtgatccctgttgtactgctcaggtttgatccctggtataccactttccactagacaaattgctgctgagtctgcctgacattctgacttaatgtattctacagagctcagctcacaaggggcagtttagaatgcatagttactggcttccatggtcaaatattcagtctcaaacagggctcagtagcaccccaagagatgtttttctgcactgcagatggtgtggactcactctagaaatccagagtactgtattttgattcttctatgaaggcttgccacaaactccacaccaaactacctcttttttcacttttcactcttccaacacaatagagtctatgagatcatatggcccaagaggcagggctgcttgtaccacagcctggtgctgcaaagtcctgctcaggccctattccaagttgccagacttacatgttaactgatacatgggcgaagcaatctttctacagtattcaattcaatgaataaatcacagcttatttgtccattttcttagatataaacaaaagtataactcttaactgtaagttctgagtttagtcttcagctctttctaatatccccttgcaccagatataggccttctcatacagtgttcaattgcttgtcagttgctgtcaactttatctcagcattagctggctgtagtagcttcaaacttaacaaaaatccagctaattccttcatccttgtattcattgctttccttcatcttccttgcctcctcctcaacaacatccctccaacacacacacacacacacacacacacacacacacacatgcatgtgcacttttctaaagcatgaacattgcacaggccaggaaagttctctcacggaactttcttccaagccatcattgattaaagtttttagtaattgggctgccaccctgtgccagagactatctgtgccccctgtgccacccagaatgggatcctcatcaccagcttgcaggaagtgatctgctcccaaaacctcattttacctcctgctttctcagaccaattccagtaccaactgtatcagttcagttattctgggaagcagatgctgagacagcgttaggagtgcaagtggttcattgaaagataacatctgtgaaagataaagggggagagccccagactgtgctacagagctgacaaaatcttggccaaaccaatggggagctctagagcaaagactgcctgttagagggacccacattaggcatagaagccaggctctagcaccactgccatgctcagccctgggctgtgggcttcccgggaagagtagagccttggttaaaacactgtgacagttcctgcaggtgctgcagatggaggctggcagctaactgcctcctgacagttacacagaaagctgtttcctggagggagatctgagtggtgcatctctgtggctgccatacccattttctctttcatcttctctgtttgcacatctgcctttctgtaccagcttctctttcttcctctacctatcatttaaatgatgctggatggttttgaggttcttatctcatgccacacttctccagcctcgcctactcccattcatacatctaatgagattctaatgaatttgaatttcagatctgtaagccaggtctcttttctgagcactaaacttatttcatccaattgctcactaaaatatcatacagtgtccttatatttaacatttccaaaggtgacattattatcttcttggccaaaactatctgtatacccatctcagtgaatggatccatcggttacccggatgctcaaaacagcatagtcatctgcaacaacatggatgaacctggaggatatcatgttaagtgaaattggccagacacagaaagacaagtggtgcatgatctcatgcatatgtggagtctaacaacattgatctcgtagaagcatcatgcatatgtggagtctaacatcatgcatatgtggagtctaatgacattgatctcatagaagcagagagtaggatagtggttaccaaaggctgtgcagagggtagggggaggaagaaatgaggagaggttggtcaacaggtataaagttacagttaggtaggaggaataaattctgatgttctattgcacagtagggtgactatgttaacaataatgtattgtttatttccaaatagctagaagagatgatgttgaatgttctcaccacaaagaaatgataaatgtttgaggtgatggatttgcaaattactctgatttgatcattatacaatgtatacatgtatcaaaacagcataccgtattccaaaaatatgtgctaattaaaaataagagaaaactaaaaacataaaatcagtatttaaagacaaagaaaaacagacacataggattattcttgatactttcttctcactcatccctaatatcaaatccattattaattattactagtctaaatatatcttgaatctgtctccatttcatttgttttcatctgagttctcaccactaacatttttttccacctgaatggaaatggagtttcttttgttcttgctaaacacagcagtgagggtgatcagcctgtactgcggatggggtctcggtctcttgagtaaaatacgctattggcttccattgctcttcagaaaatttcagactcttcacatggtttatgaagtccccgtgatctggccctgcttgcttctctttgcaggcagatcttttactagtttccctccactttagtcacttctattatttcagccactttgaactatttttatattctagaattttatttcagccacttcgaactatttttacatcctagaatgtgtcattcactctgctgctcttattgcttgcacaagctattcatttttgtgggaacattctttatttccactcttttttttctataattaacccttttccatctttaatgcatatgaaagcacaaaaatagcaacacagataactatgtgctaccatcaaaattaaccagaagttaacaattggctttaacttaggtttctcttttattttttaaataaataaaatgttacagcaacaactaaagctctgccactatccactttttccttctctccccacgcagggattaagatagaattttactgttattgtaccctctcttgctgttaagaaatctgccaccagctcagttatccttctcttgatgttttcatctttgacttttatttgcttttaagatctctttgtctttaatgtttaacagttttcctgtaatatgtgtagatattgatgaatttttatttaccctgctttgaattcattgttctattttgaatgagaagttcttagccattatctctttaatattgtctgtcctcattttctctattcttttctcatgtgagtcctattagatgtaagttggatcatccatctttcattcttgccttttaacttctcttttgtgttttctaatatgatatctctctgtgctacattttatctggtttcttagctttacatatatttccaggccactattcttcagctaactactcttctgtctaatccatttctgttatatttcggttgtctgttctgtttcatatatctgttcatttttgtggttttgatcatgtcttttatgtcctgaattagtttttaaaaaaacttattttataatcactttgaaatcattctattctctgtaattcttgggggtgtcagtttgaaaactgtgagatcttaatggctctttcatggtgaattgttacctttttattttataatttaggattataaactcatttatcattgagaaaatggctcaaggggagttccacaattgtttccaacagcaacatcagggatttcactgctcagggatatattttatgatactatctcagcttgggaggtgtctcagccatccagtagtttaaatgccaaccaaaacacacaagtttatgggcaagggcatggttccagattctcaagaaggtttttttaaaaatagaatattgagtttgatgcagtggcgtcaggagcaggacgactctttgccattcagatcatggggaaagcagtgggaatccaagtgaggagcagccagaggacaacagaggagaggatgggaggctgatgacctgggccctgggcgtgtggaggctgtgactcttctctagctagaggactcttcttttgtgggaaggatagcatcttctgaggacccttgctatgtgagcaggctgacataggtggtgatgaggtctgttcctttctaggttcctgtagagatctgtaggtagctgttcactagggagttaactaagaaagagaacaaaaactattcatttggatccaaggtccatcaccgctggtagctgtggtggctttggattgtcggacgaccatcagcttcagcaggtctgcactagggaacaatcattcttccctagcccaagcgtgcctctgccctctgtatcgttgacagaggctgcatgtttggcaagagaacatagtgactgctgaactgaaagttgactctaactctcgctaccaagtttttccctgacacagtgaaagagtattaagacatcagcctaggacaccttgagaaccaaggacaagatggacagggccaagtaactgggcttcaaccatgactgggactaagaataagacaagaggccaggccaaagcggaaaagagtctgctatacaagctaaagctggagaagagagggaggctacgggtgtggttaggcctgtagccaatacctgggccaaagcaaaagacaagccagggtctctgacagatgcagtggcagagatgaaggcagtgtctaagaacaaggtcggtgctgagatgaaggaaggagcccctgtcagagcctaaggctctgggcaaagccactggagatttcagtcccgaggctgggaatgagtccaccagctccacatgtaaaaatggggctggtattgatgcctgggtctgggctgaggaagaggccactatcaattcctggttctgaaatggagaagaggctggtaatcattccggtgctaagaatgataaacctgaaattggtgcccaggtctgtgctgaggagttggagcctgtgactggggccagttgcaaacctaggtctggggctgaggaagaggaggaagagaatgtcattgggaactggttttgggaaggagatgatgctagttttgaccctaatcctcaatctgtgagtaggatagttagatctcagcctgtggatgaaattaatggaaaaaaaaaataggcccaaggactggtctgaggtaactatctggcccaaagcccctgctgtaactccagcagtattcggattagatcccaggcatctaaggcaagccctccttcatatattgttttggcctcagctgaagaaaatgcctattctttgcctgtggcaacagcctgcccttgtaggaacactaactcatgctcacagcccatccctgagtgtccttttggttccgacccttgcatccagaccatagatgagattagacaccaaatcaggattagggaggtaaatgggattaagccatttgcttactcttgcaaaatggaatgctatgtggactctgaggaatttgaacaacttgttaacttacttaagtcaactactgatcctcttgttcataaaagagcacagattgcaatgggtatccataacgttcacccatttgcccaagagtttattaatgaaatggtataatgatgcttattgaaagcttgctcagttttccttccccagaaatgagaaaattactaattttcttatgagtaattactctgaatcctccttctggggatgaaagacaatgcaaaattgaattacatgttaagcatatgtgtaaagacaccatgtcatttcctttgaactcacctggacagcaatctggatcaaagatactagggcaactgactactgattttgtccatcactacattgttgccggtgacttttcagagctttttcatttgccatccttgagaaagtacaaaaccagacatcttgttttgaaagtaattttaaatatatctgaaaatccaactgcagccagagacatgatcaatatgaaggcactggcagcatcaaaactcatctttaaccataaagaggcaaaagccagtcttgttagtggtgtggccatatttattaacataaaggagcatatcagaaagggctcaattgtagttgttgatcacttgagttataatacactcatgggcattctcagggaagttaaagggattattgaagcaatgtaaaatgagccagagatagaacactttgaaccatctccaaactctagcaggctgtacattcccaaagagccttgtatcatatttggttattatggtgtacaagttatacattgcatctttaacacatagttacctgtgacaagctctaggtttgagctaaactattttgggggtatcagatgaatatcatatcactggctgaaaatgtttgttgatttttttcttgtttagattggcatattttttacattttatttaagaaagcgaacgagttcgttgtaagtgagctaacttgttcattagtatctccttagatccatctgtggcttaaaatggcaaaaaagaaaacatccttgaatttgaaatctagttatagaagtaaggcatacacacacacaaagataactaacagtacctagagagagagtgagtgtgtgtgtgtgtgagtgtgcacgtgtatacccatgaccaaatgtgcactctctacataaaggaggcaggggttgctataggctgtttaatgtaagagaaactactctttttctcctattccagccgtatcagatactcattccacaacacagaaagatccagaatttcagacaaatgcattatttgttcaattttaattttgcttctacatttataactcttaaattgtcaggctgtttcatttatgtcaaagtcatctcacaaaagagaaggtggaaacattttgtgagtgcctattctatgtcagacactaagttggcaccatattttgcaagtttatttttttcctgtactcacagtgatcctgtaaactaggtactcgtgtttttattagaactcattagtctgggtaccctccaatgagaattagagagggtaagtactttttcctagattcccacagcaggcaggtggcatagctgttttatctgacaccagaacccatctcaccatactcctttacagttcccctgaaggacattttgaggcgacggccttcaaagctcagagactggttttaatgtttaattttgcatgccaggttacaattcttaacttcctccacatgcatgtgtccatcagacatttgactgcatctggctggaggtcagctgaaaagtctgagatgagtagatggattttatctggcagtgtcagaaaaatagtaggtgccccaaactttgttcagtgagtaagatggagatttggagtcatcagcaaggggaacttgttagatgtcctttgcatctttttctacccatttgtactttatcttccccaaagagctgaaatcatcctgtacattgttttatatcctgaattaaaaaggtaattgcttttggccgggcgcggtggctcaagcctgtaatcctagcactttgggaagccgaggcgggtggatcacgaggtcaggagatcgagaccatcctggctaacatggtgaaaccccgtctctactaaaaatacaaaaaattagccgggtgtggtggcgggcgcctgtagtcccagctactcaggaggctgaggcaggagaatggcgtgaacccgggaggcggagcttgcagtgggcggagatcgcgccactgcactccagcctgggcgacagagcgagactccgtctcaaaaaacaaaccaaaaagaaaaaggtaattgcttttttcctccttgcaaaatcatgccttaattttttttatcatttgtgatttattctcctatgtgtcctatgaaaggccaaagggctttatcttttactagtaggcaagcctgggcatttctgcatttgtaccggctaacacgacagaataaatgtaatcggagaaatttagatccagaattgcagcttcaacaatacaaaacagcaaagctacaagaggctgctgtgccaatctacaagacagtgattcttagtcgttggtatggaccagaaagcatgcccaggacgtttaggttatggctgaattctctaagactcatggtgggaattgtaatccctagtctgagctgaaacggaagtttctatgtgtgaaaatatggggtaatatgctttgaggttttctgacagttaagaaactaagacaagatcatactgtaaatatgtatggaacttgcttccccccagttgtgtattgtaaacatctttgcatgtcaataaatatgcctctataacaacaacaacaacaaaatagaatatatacaaggggtatgcaaactttggtcagtgggaagatctttgctgactcacattttcattaagtgtatagcactttgacatccctcattttgtagcaatatcttaattccaactcttcctgtcacatgtgctgacatctcttcttacctcgtgtcagcattaaaatccaaactctcagcatcctgaggctggcgattccttccccatgatcatctttctacttcttgagcattcacagagcttgttactctgttttcagttctttcataatatctggggagttcctggatttctagagagttcaggtattcatttgaaataattgttatgttttatctaacatttatcagtggtcatagtgggaaggtttggggattatgtagacttccaggaagtcttcatctttcagttcctagattattcattgcccagatatttattgtcttggggactatattgggtattgaagagagctggtaaaaaatacagatagagagagatagatagagatagagatagatcctacactattaactttacaataaaattagacatcagtttctccaggaggctttctctaacttttctcaaatctcaaaattagctattatacgtagctaactcactgtatatttcctcattctgtcattcttttttttgtttgttttttgtttgtttgttttttgagacagagtttcgctcttgttgcctaggctggagtgtaatggcgcagtctcggctcactgtaacctctccctcctgggtccaggcgattctcctgtctcagccttccaagtagctgagattacaggcgcccaccaccacttcctgctaatttttgtatttttagtagagatggggtttcatcgtgttggccaggctggtctcaaacgcttgacctcaggtgatctgcccgccttggcgtcccaaagtgctgggattacaggcgtgagccactgctcccggcctcattctatcattctatcacactattttaattatatattaatttgtctgtatcatcttcaagattataagttctgagaaaatggtaaagcatgtccttctgattcgttattccacagtgtcttgcacaaagtccaccacattgcagaaacaagattattattgctgaacacagttgcttcagaaagtacttgagaattttcagtatcttttaagaaaattcaattggcctgtttttcccaacattcatgcactatcgacccttcctttttcttaagtttgttcttctctgtatgtaaattatctcaagcctcctgtatccttaaaaacaaagaaaaaaaggaaacagtaataccttccctagtttcctggatctaaggattgtattctgtatctccttctgtcaaatattacacagtttaccattcctgcatttataagctcttttaaaagccagccaaagcaatcctggtgcttcccagatgccagttccacaggaatattggtcccccatgaggcaatttgctaaagcactctggctctttcctgatgtctgcacttatgactcatggctgatttgattacttcccggtgactccctgaatcctttgcttgtttctatacttcaacgctagttcaattttcttacattaattatgttttaagcattaattatgttttaggcttgattcaagtcttatgctgcatcccacactttttaaaaaattaaaaaacaaaacatttttattgcatcccatgcttttaattgacagctcaattcacctgggatttctccatcaggtcacgcagctctgaaagctctctattgcccccttctggtagctggcagactagctcctcaattagcttacatcgtcaatgctaaccttgttgcttgatgttgctatgcctcagatactagtatcttcctttctttcctatattcttcactgccgctgtttcttcatcatctatttattcctcattcctttcagactgacttctgctgcctccagccttctaccaaaacttgccatcccattgatacaaggccctctcaagtcttctggatgatctctgtatatgaaaatattgcccttccctttcctacttcgccccaacactttattctaagaacttgaaattctattagaaattatctactctaggagtcttcaaatttgacaacagattaaaattgccaggacaacttaaaaatactgtttcctgggcccccttcctgaaaattctcaccttttaggtctgaagtagaggtctcttttgacctattgtcatcattaaaatcccaactcccatttgaactttaatttaaatgtatttattcagttaggtaaatcatgcattgggtaaaaatttaaacaatacttaaatccacccttcctgtataagtgttcttacaagctatagagaaatacctgagactgggtaattgataaagaaaagaggtgtatttggcacagagttatgcaacctgtacaggaagcatgatgctggcatctacttggcttctggggaagcctcaggaaacttacaattatggcagaaggtgaaggggaagtaggtgtggaggaagggggtggggaagtgccacacacttttaaatgaccagatctcatgagagctcactcactatcatgagaacagcacggcaggggagatctacccaccatgatctaatcacctcccaccaggccccacctccaacattgaggattacaatttgacctgagatttggacagggacacagatccaaaccatatcacttccccttagtttccttacatttcctctcctaaggcaatccttgttaacagtttcttaaggatccatgtaggcacaaattccatattctaaagacatgtctcaactgatttggatgcatttggtccactaagcttgaggagcctctgatttaattcacccctctcatcttccttgaaattctttcatccttcaacatcctttatgctgattgtcgaacatctctgatagtttgattctgtcttcttggtccacacctcctactttttctgactgtttaatgtgggcattcccccaaactactccccttgatcttcttttctgtctatattttctttcttgacacatctctccagacctatgagtcactcacagaatatactcatatcacttgcgccaacatctcaagctagccacacaccagtattttttctaccagttagacatttctgtctagttgtctgggagcacctcaaattcagcacccaaaatgaacttacctttctgttaacaaaactacttatgcttctcttttccccattgtccttacttctgttatcattgactcttcctctgcctcttttatgttaattgcaccttgaaatgacccacacttcttttccctccacttcagtttcgtttgttacagcattttttacactagcttcacttgtggttaccacttccctgcccactgctcataagccccttgaggattcttcagggcagcaactatattttctttatttctatgttctcggcacctcactcattctctcatagtaggtgttccatggatatgttgggtcaatgaatatccgttaaagctcaaatttttaacatggcagtcgacatcttccatttctgatttaccaacctctttaatttagataacttaatttacgccttgccacaaccaaactgaactattcacagctctcctgaatgcacattgcaatcttccttttgcacttctttgtttatgcttttctttctgcttgaaattcccatctgttccctgcctatcaaaatcctacaaatccttcaagtctcagatcaaatgccttattcttcccaaagccttcccaaatccttaagtcctgggttcccacagcgtgtggattgcattttagtctcacttctattcgactaaatttataaaatcatcggattttagttgtggaagacactttagaggtttggattttagttgtggaagacactttagaggttacctaagacaaccctgtattttacagctaagggaactgagacccagaaagagtaaatgtcttgctcaagattaaatatcagccagcgaccaacggagccagacctagaacccaactctcctgaattgttttccagagctatgctgcctatgcaattgttttagcttctcttccggaccattagtgccaaaagtcaaggattaaattttattcagctttaattccttataatatccaatatagcacctttcatatagtaggttcacaaaagctatactggattgaaatgaacatttaacgtactggttaatagatatttttagccagagttccctggaaaacagagtgtgaggcagagattacttgctgatgtgagagtaaggagaaagaaaaggcaggaagggctaagggacaatgcagtgactactgcttcccagcgaacctggaaacccagcagggaatgtggcaagtggtctgtacatccaagcaaggtatctgtggccaggctgtatggacctatgccttggggcagctcataataagcaacttactgtccccatatcgtctcatatcttttttcccaccgatcaaagttactcccctgcacttccagttctgtcatctggcccctttgatggctctttggaaagccagattccatgccctgcgggaaggttcctcggttgagtccagagtggaagaggatgcaaataagatatgtccaataaaaaaagctttgaacctacacctgttacttaaccctgttacttgagattgttcctattttggtttttgaaatccattgatgttggaaacacaaaactggtgatggctttctttaagagacaggctgaaacagaattttttttttttacacggagtttcgctcttgttgcccaggctggagcgcaatggcacagtctcggcttaccgcaacctccgcctcctgggttcaagcgattctcctgcctcagccttcccagtagctgggattacaggtgcccaccaccactcctggctaatttttatatcgttagtagagacggggtttcaccatgttggccaggctggtctcgaactcctgacctcaggtgatccacccacctcggcctcacaaaatgctgagattacaggcatgagccactgcgcctggctgaaacagataatttttaaatgttttgtgcaagttaacagtgacattcatgaagagaatgattaaagtacagcttgaataagttctgatttttctctcttaagaattatgtgcaaatccatatgtgacttttaaaaatcatcagatttcaatgttttctcatatgatgttatgattctacattaaaagaactataaactcttctaattaaattactcaagatagtgcaaaagaatccatgactctttgtcctcagatataactcgtaccctaaatgcaagttgtttaccagtgcacatgacaaaaaacacctaagtagggggaagaattctttctttcagacaagtggttttacctacttaaaaaaaagccttgaaaacttggacacccttcaagagcctctgaatatttttcttcagcagaaattccagcccagatgttcaataactcaggtttgttttaaaagaggaaatagagagacaaatttttgtgaagggcaaaatttgaaagcaattaatggtgacatgtcccagaattttgcttcattttattattaacgcaaccattctttccaaattttattgtcagatattggagaagagagaggaaaaaagtctgggaattggagataaaattcaacattgaaggagacattttaaatcccagtcaagaggaaagaaagagttgatggctaagctgactgccaaaagacattgtaaagttaccagataacaacaagtgataatagaagggcctagggaagttctgctcatagacttcaaacttggaaaggtgtcctgcagaccaaaacctgctgacctagcagtggcaaagttgccttaaatgaattcacaccgacaagcctggagggattgtctcttgatgctaaagtgattcggtcatacatatctgagggcactaggtgaaatttctggagaatcttggaaaataagtgtgggaccagaaagatagaatcactttgttctggtttactttaaaaggataaaaggtgcttttcatttgctggatcacttaaatgctctaagtctctggttctcctataaactggggactatttactagccccatttatttaccagaattgttttgataatttaaaaaaaagatatgcaagctaatcataaattctaaatcaatataaaaatgggctgggcgtggtggctcacgcctgtaatcccagcactttgggaggccgaggcgggcagatcacgaggtcaagagatcaaaaccatcctggccaacatggtgaaaccctgtctctactaaaaatacaaaaattagctgggcatggtggcacatgccagtagtcctagctacttgggaggctgagtcaggagaatcccttgaacccaggaggcagaggttgcagtgagtcgagatcatgccactgcacagagagactggcgacagagagactctatctcaaaaaaaaaaaaaaaaaaaataagctagtgagtgactatttaagtctccttcttctttccattttcattgcactttacacatactactgttgtagatcttactgtgttgcatgatggagaggtttatgtccagtttcccaactggaatgtgagatactcaagaggacagacgtcaacttatttttcatatgacccccccaaacccaaaacaaggattagcatttaatgagtgcttaacaaatgcttgctgaatgcagcaagattaaaaaataatctcagcagactgtgctgcaaaacagaattgcaagatgataacctaactaagataaatataaaccctacatttgactctaaataataaattgcacaattattggattgtaaagtcctagtccagaggtcatggtaaaaacatctgggagctgcagttaactataaaaacaggaaagagaccgatgaagcttctaaaaatattaacttattaatactagcatagaatcatgggaaatgatgggaaccaagagaaatgatagtctcactgcgttccttgtgggtcgaatcacattttaagaggaattgataaactagagtaaattcaggtgactccatctaataggatagacagtaccccatgctataccaaaacgagttaaaagagctcaagtagggctctggggaagagaaaaataaaatatagatttgagctgtcttcagttatttgaaggagatccagtgttgtcccagtaggcaaaacttagaccaaaaaaattgtactcccaaatttgattatcacatatcagatttggattcagtaagaagaactgttctaaagatcacagctgttcaacaatggaatggactcctctggacggtagagagattgtgtcacacaatacctggggcttagacatttcttgtaatcctgtctgtacttagcatagctctggacacacaatccatagtcactaaatattttttcacagattgatactagggaaaataataatatttaactatgagtatatgcctactctgcccagtaatgtttagtattgaaccagagatctagattagtgatctccagatttaattcattatatactcctatcagtaaagtttttgaacaggtactcctaatatatacatttatttataaattctatactatactactctactaatcgtcatatcaaatacatgtttataaaacaaaaataatgtaagggcaaaaatatgagataaagaaaaataaatgttaatgtgttttctttctgcacaccaatggatcatcatggccaccccactttgcagagaactggtctataattaagggacttaacatctgcctcaaatacctggatattttaggcccttctgagtctgaatgatctacatatcaatcttaattttttcatttctcttttcccatgtagacaaaaacaggattaaaaaaaaaaaggttaagcgatgttctaccatttctatacagttgacccttgagcaacacaagtttgaacttcacaggtccacttatatgaggattttttttcaataaaagtaacactgagtatgctgcctcttctgcatccccttgcacatcctccatctcttccatctctgacacagtgagacagcaagaccaacccctcctcttccttttcctccttcttcaacatgaagataacaaggatggggacctttatgatgagtcacttccacttaatgaatagtaaatatagtttctcttccttatgattttcttaataacgttttctttttttttctagcttactttattgtaaaagtacagtttgcaatatatatgcaaaaaaagtcttcactgactgtttatgttatcagtaaggtctctagtcagcagtaggctattagtaatcattttaaaaagccacttatagattcaatgctattcccattaaactacctttgacattcttcacagaactagtgaaaaaaaaaactatttaaaaatttatatgaaaccatagaagagaccaaatagccaaggcaatcctaagcaaaaagaacaaagctggaagcatcacgctacccaacttcaaactatactacagggttacagtaaccaaaacagcctgatactcgtacaagaaccaacacatagaccaatggaacagaataaagaacctagaaataagaccacacacatacaactatttgatctttgacaaaccaagcaaaagcaagcaatgaagaaaggattccctgttcaataaatggtgctgagatatctggctagccatatgcagaagattgaaactgaaccctctccttacaccatatacaaaaattaactcaagatggattaaagacttaaatgtaaaacccaaaactgtaaaaaccttggaagacaacctagccagtaccattcaggacgtaggcacgggcaaagatttcatgacaaacatgccaaaagcaattgcaacaaaagagaaaattgacaaatagaatctaattaaactaatgtgcttcaatttactttgttgagagtataaaaaacactatcaacagagtaaacaggcaacctacagaatgggagaaaaaattcgcaaactatgcatctgacaaagatctaatatccagcatatataatggacttaaatttacaaagaaaaaataaataaccccattaaaaggtgggcaaaggacacgaagacatacatgtggccaaaaatcacatgaaaaaaggtgccatatcactgattattggagaaatgcaaatcaaaaccacaatgaggtaccatctcatgccagtcagaatggctattaaaagttaaaagaaatgcttttaccctgttgggagtgtaaattaatgcagccattgtggaagacaacgtggtgattcctcaaagacctaaagacagaaataccattcaacccagcaatcccattactggatatatacccacaggaatataaataattctattataaagacacatgtgtatgtttatttcagcactattcagaatagcaaagacatggagtcaacctaaatgtccatcagtgatagactggattaggaaaatgtggtacatatacactatggaatactatgcagccataaaaaagaatgagatcatgttctttgcagggacatggatggagctggaggtcattatcctcagcaaaccaacacaggaacagaaaatcaaatcccatatattctcacttataagtgggagttaaattatgagaacacatgggtgcatagagggaacagtacacattggggcattttagaggctgggggatgggaggagggagaggattaggaaaaacgactaatgggtactaggcttcatacctgggtgatgaaataatctgtacaacaaactcccatgacacaagtttacctgtgtaacaaacctgcacttgtacccctgaacttaaaataaaagttaaaaaaaaaaaaaagaataaagggtagcaaacacaccttcttgctacaaaagaaaaaaacagtaggctattggtagttaagttttggggtagtcaaaagttatgtgcaaatttttgattatgccattgtcgacactcctaaacccctccattgtcaagggtgaactgtatctgtttttgtaagtcttttatgaaaatatttttaaatgtcagttttttgttgaccctgcatgattgtgatagaatttttctacctcgtgtctccaaaacagatgttgttcccttataattataatacattttacaaaatcgcaactgcagagtgttttgttgaagtgatcatcttaaatgaatgcatgagccgtaaccggatcaatcattcttactcctgtcaagctttcaattacattccagagtcccagcacaaacctagcagcttgttggaacatctagatgccctttgcttctacatcctccctctttcctcccagatttggattacctttaaatgagctattatctgatatgatgccacagtttccatgattcgtattcatttttttaaaactttcgtctatgatctagtaagtgacgatgactggtttattgcaaaattttctgaatcactttgctctgtcagattaagctttcagctaaccagcagagggagcacaaagagacacactggtttcatctcagtgtacagggagtctagttactaagtggacgaagaactcccgcacattgagatctggtcctcaactggcaagaagcactgttcgagcaatcaggaaaatctgggctttaagcagtggcaccactacgaatttattctcttgcctaagattacttggaattcctatagtagtgggggaggggggactctcttttgtactagttcctccttaaattttaaagaaattgagcccgtggactgaggtgggtgcggatggtgggatgcagaggaaacaaaaatttcttctcatctagcttccactccaaatctgtttctcccagagaaaatacaagacttaggagtgctgtatgaagtctcttgctgctctattctctaggaaacctaatatgaaatcattaagctactgaatgtcagtttcttcaacagtaaagaagacacattattattgctgttattattactactactactaccaccaccaccactaccaccattactatccatttagtgacttctgttttctctacttaatctcacttattcagcatatcagccctaagaggcagattttattgctcccattttacagaagaggaactggaggcttaaagaagttgaagaactcaaccaacgtcaagcaactagaaaggaaactggaagaaggtgtctctgattccaaagctccatgcttttcatctgtgttggtaataaaaagaataataccatatcacagttatattgtacattacaaagcactttaacctttatcatccccacctcgggataattctgtgagctaaacacggacaaatagtaacattcacccctccctatctctctttacctctttagctcctatttttaaaaaacaagcaattaagggaactaaagcttacaaaatgtaaaggatttttctaaggtcacatagatgaaaaatggatttgggattaaatgggttttattcctgtagttgccacatcacactgctttgccacatagagaggaagagacccagctttgcctccaactagctcttttaccctaaaatgatcatttaaaccctggagttcttgcatatataaaatagatgggagtaacaataataattaatacttatgttaacaacctcacggtattcacaaagatcaaatgaaatacggagatagttatgaaataagtaaataatatacagacaaatatagttctattgtaagattatcctgggtgttgaaactaggttatgtctgacttctggcaaaattacaggacagggcaggttagtgtctaatctgcctacttcccaatccccaggtagctgtcgcctgaaaaggcatcggaagatacttaagagataggagattgttcatatttacttaattttttggatgagactgtttgtctgaactgtctcatgagatggtatttacctacttgggaagctcattctctcatttgggacttggaagcattctcattgtacaacagtgagagctggaatgccattacatcattatgaaccacccagtgcccatttgatatagttaataacaaggattaatgaagtaatttaaaaggaagaaatagaatccttgccttgatccaagacaaaaggacaaaaaaaatttctttctgaaatttgagggaaaaaatattggttgcttctattcttttaagaaactgcctgagaaaagtcacagtgtgtgtgttatgtgggaaataagagtattggggcaggcaatcattcatatgttagatttctttgttcagatcaatattgtttgagtgctaacactgtggtaggtgctggaaatcgaatgctgaacagaacagataagttgcccacactttcatggaatttgcattttagacagacagccagcaatgatcaaataattacatgtttggtgggtgttacaaaggagaaaaacagacttccattatgacctcttatgtaatcacactgcaatatcttgaaattattacttataaagatcaagcagaagctactgctgcatactagagaattttaaatgatttccaacatcgagaaacttgaatttcttaaggagtagttattataaaaagaaactggaatggctaatcttggctgtctctctaaagccaatataaagaaaatgagtgatacacaacattatcttgacctcactgacaactagatagcctaagaaacagtgtgtgcaatagagtagaaggaagaatcaaaggacatattttataaggataatgagttctgctttcttttcctcttctgggctataataatttttgtctcttttgtaatcataccctcttggaaagccactggcttggactgatttatgcctactacagatttttccttccaaaagtacatctccatgactaaggaaatgggctgtctcaggttggctggttccatcaagaacacttaaaacttgattgcacaattgtaaaaccaactggggtcttagcatcaacttgcattttctcattggcatccaattttgaggatatcatattgcttggagaagaaagaggcagtagttattataatttccgtggacttacagagttttagagacttggatatcgtgtactttaacctcacacccagtgtaagaatctcctatacctgattcatgatattcatcttttgaatacatagggtaaaaagagcttactatctcatttttgaagaattctgttattcttttttatattggagaaaatctaccaccattagtcttagatatgttcaccagagccatcatggaccaaatcagaagtaatcatttctacttaaagactttcctcctcttcaccactaacaagtcttttctcttctaggctaaacattccaggtttttcctccattctgtataccacatgatcctccaaattgctcccattttggatgatggagcttgaggaggtggaagatcaaaatgttagtgtgtgttatctaacagatttgctctttctctcagttttgtaacattagcaggtttgatcaatatttcacctgtgctgcaattcacatcgataattaaactatacagggttgctttaattataaagctaaaagtggatttttttccattaacattaccagataggatgatttgccaactcgttctctgggtctagaaaatgcccaatgaagtcatattgactctaaaatcaagctctggatgtgaagatgctgccatgctgttgagtcaaaagaatatattatttttcatttctgttagaccagtaattttagtaactttggcaaaaggaatataaaaacaagcaatctccaatttatagggctgcactgtagaagtcatttgtttggaatgtatttcacatgagtattaaatttttggggaagactaccaaattttttttcttttttttcttttttttttttttgagacagactcttgctctgtcacccaggctggagtgcagtggcatgatcttggctcactgcaacttccacctcctgggttcaagcgattctccagcctcagactcccgagtagctgggactacaggcgcatgccaccacacctggctaattttttgtattttagtagagacagggtttcaccatgttgcccaggctggtctcgaactcctgagctcaggcaatccgcccgccttggcctctcaaagtgctgggattacaggcgtgagccaccgcacccggccaaaatttttaactcctaagacaactgacattgtaaaccagaatgtcatttccggttctttaacttaacatgtaccataagcaccacgagaaatattttgacatctagcacgatgtttaacaatgtttttctggattcggatgaccaggatcactgctgggaacaccaggaatattttcatgcttttattctctatccaattgagttaaggatccccggccccacatctgctgaataaagaaaactgggatccttgtggcctgaatctggtggtggctgggaaggttaagatgcagtgatagatgctacagagcttctggaataaagcctgcctaccactggggtatactcctcagtcttcatgggtcgcagtcagactcccattctctctttccctccacgtcagcctgattcatagcctcttcgtactcattctctctctctcctcctattctctcttcctcaggggtcatgacaaaatcttccagttttgtttcacttatcccttaagcactctccaatgctttaacagttttctaaggtttgtttttcccttgctgggtagctaatgaattaattaagaggggaatattgctagttgcaaaagggaagtggggtctatagaggatctctccagtggcagcctctgtctctcaatctctctcccattctgtctcacttacagctggcagggagaggcagaatcacctgcagatgctgcctgtgggctgagtaaaatgcaccaacttttcaaggaaaaacaaggacaggcgattctaggccttaagggaaagatggtgaggtaggtctgacatctggcctttgatgagaacacagaacagtacttctttgtgggagttgggagtgagaagctgagaactaacttttatttttttttaactcttaattgcatttattttatgctgaatttattcccatgccgtaagtttttgtttcttcagtttcttttgagatatcttttttttccttatgtacaacagaaatatcatatgttgcagcaatatcagcacaaaagaaacttactgaatccttactgaaaaggaacagattgttccagattacttctcttcaggtttaggaaaaatttgttccttttcagtaaggatcatcttgatgtggcagggagagtacatgcatgggttaatccgaccatgagctctataaggccagtagcaaatcttaggtgctttatttacctgggtatgctcaatgacctgagaatctacatctacacccttaagttcggcatttctctcagcatttataaacatgtgcagcaaaaattcagcactcattttgggccaccaaccctgtgtccagccccactgcttggcctgggcactaccaactcccccattgtaacgtcagaatggtacacactgtttctgtgaagtgacatctttcagatacttggtggcttttcgtacaggcacacccttgttggcctgggcagtttcacgagtgttcttacaggaaacacaactatttgaaattcttgatttgcctgattttgaggggttttctgggtcgagtgaacagaaaactattttcacagatcacctcaggccacttaggggaagagcgggactaactttcttgatcttgcttttgcctgccttctcttttcacaaaggaacagatgttcctttcaccaatctttcaccgtcattcatttttcttcctccccttctaagacacacttggctattgcagaaacacagttccttaaacacaagtccaaaattcaaacagctctgaacattgaaagtttttggcaacctacattgcagcagaatttggcccaaactgacatgaggtgatatcatctttatttactcacatatttactataaaaatatcaattatcaatgggattgttttaaagtacagccccagttcctgcttgagtataatcaaacatatgtatattacctttctaaaatctgaaaatttttgaattctgaaatacatctggccccaaaagtttctgggtaagggattatagccctttatttcctgttttcctacatctttctctttccagctaagtgtaaaagagtatagactctggtaacccaagctgaattcaaatcctatctctaaatatcagttgtgtgtgattttgctctgtttacttaacccgtctgtgcttcagtttccccatttgtaaaatagggataatagtattacctatctcaatgttgttgtgaagatttaattgagttaatctatgtaaagtgcttacagtaatctctagcacatagtaagcactataggtttgctattatcatcaaccttaatccttcactctacccaaaaatattacctaatgtcccaattataaaatccctgctcttcgccctattccctccatagttaaccctctatccattttcttccactcatgccataaacagaaaaccatttgtcattagttaccattgactactcttcaactggctgaaatctggtttgctatcctatttctcaactccatggtaatttctctcattaaggtccctaatgcctcttttttttttttttttttttttttttatcttttttttttttttctttttttattattattattatactttaagttttagggtacatgtgcacattgtgcaggttagttacatatgtatacatgtgccatgctggtgcgctgcacccactaacgtgtcatctagcattaggtatatctcccaatgctatccctcccccctcccccgaccccaccacagtccccagagtgtgatattccccttcctgtgtccatgtgatctcattgttcaattcccacctatgagtgagaatatgcggtgtttgctaatgcctcttaactgccagtttaaaagactgctgtttagtttcttttgtgctgttatttctgcaacatataatatttctgtgacaaatagactcagttctccttctacttcattttcattctactgctccggtgactcgctcattaaaggttgacctccccaggtgtttcatcctttgtcctttttgtacagtacacatgctccttagaaaaatctcatccaatttaaagtgtcagctatcacctggataataatgactgccacattttatcattagccctgacctcttccttgtgcttcagactacatttcctatttgcctcctgtgtccagccccaccacttgacctgggcactaccaattcccccattgtaatgtcagaatggtgcacgctgtttttgtgaagtgacatctttcggatacttggtggcttttcatatatgcacacccttgatggcctgggcagtttcacaagtgttcttaaaggaaacacaaatatttgaaactcttgatttgcctgattttgaggggttttctgggtcgagtgaatagcaaaccattttcacagatccatctccacttggatgacctgcaagaatctcaaatgtaatatatcccaacaaattgtatgatcttctccctgacatcctgcccctaacccccattccagcccccaaagtaatctcacaacatgtatgttttttcatttttaatctcagctttaatggctttgcacacttcacctattagcttaggccagaaatgttgaatcttcattcgtctttaacttccacattcaatcagtcactaaatcccgccaatttgtttttagtaacatcgccagaacctgcctactgatttactaagggcttgtactaactatcatgtagaccagtggcttgacctttttgcccataacccatggtataaaatatattttacattgtgccctgggatatagacatgtttatgtacatctgtgctctattttatttcatttcacttttctaaaattatggttatgataccctaaattgattttacaatctaccaatgggttacaatttgcagtttaaaacaccctgacctcaaataatagcactttactcgtctcccctctcccgaccccggtgggtcaatagatagcacttcagaggttgtgtaccaaaacccttaaaggcagggattgtaatctgccaaagaaaatgctcccaagaaggtgattctgatatctcctatatgttctactcagttatcaagacaatactgaatatttcttagacatgtactatacataaagcacacagctgtggctcaaataagcatggttcactgatttggcactcacatttacatgaacttggaaccctcaaaagcccttaatgctccatgtattttcacacctccattgacactgcacatactattccccttgcctggagtgtcctccatactccctttcatcaggcaaatgcccatctgtagcaatgtatacaaaaatctatttatttaccaaagacagttaggtagcagaggggtagtagtggtactgggcccagtttatgtccctctccagttactctgtttcctggtcacaatggtcccagcaaccgccatggtcattgctgccagctcactccacaaagtctgtcacaatagcctgcctgcccctcactctttgatttgctgactcagaaatactggaagtcatattcatggtttatttaaacaaggaaaaacatatgtatgagcaggatgccccacaggtgttaacaaccacatggccttctgattaagaaagtttccatccttggatactcatggttttctcctcatttctctcctacctgggaaatataatatgaggaaggcactgttaggaatccccaccttaagggtgagggaactggggcataaagagattgagtgattattgcaaggcacttaaccaatatgcagcagagcctagagtttgaaaacatctctggagatgaaaatatgttccttttctctcctataatatttaagggaaaaagactacaaatccaatttgtacttgtctatgcactggtcctgtttctcctgccttctcatgaaggggactcaagcctttgtgtgtgtgtgtgtgtgtgtgtgtgtgtgtgtgtgtgtgtgtgcacgcacgcacgtgtatctctgtgtgtgtactctcaatcagcactctaaaatatattggcactctgaaatatatgtgtatttatgcatgttttataggcacatattactgtataatatactatgtaaattataaaacaaacacacaaaaacataaattcaaaaagcatgaatttttaaaattataagagaaagttctaatatttttctgcactccccagtatattaccttggatactgtattttggagacctgccataaagtatcatacttagtagaaaaacatattttctttcatatacaggaaaaatattgatccacaatcaatattgttcacagggttgcttctcaagctgtggtgttgtctgaatgtcatatcccccaggatgccattcaagacaagcatttgcagttttgagatggctaattctaattaggaaagcagactgccaccacaggttataatctgactaatgtgttcttggaaccgcggagctactgaagttttcgggtatgacgtcagtaaggagtgatgaaaggaggactggattaacagcagataaaagttctaaataatttgacctctgcttaaaatagcgatgggccttgaacaaaacatttaatagtaacgggtcctttgattaaattgcttttgcatgtatttaatattaattccactgatatgatactaaccctaagaaataagcatggctgatactagcccttaattttatatcataaatgagcaaaatcttaaagagagtaaatgacttgcccacacagtaaaaggcataactgggcttcacaatggtatttttgactcatgtattatcttaccttgcttaacctctttgggcttcatgcctttaaaataaactttctgttttagaacagttttaggttttaaaaaaagttgtgaagatggtccaggtagttcccatatactttacacgcattttcccctatgtattcgcttgctagtgctgctgtcacaaagccccacagactgggtggcttaaacaacaacagtttattttctctcagttctggaggctataagtccaagatcaaggtgtagaccaagatcaagaggcttttctggggcatctctccttgtcttgcccatggcctccttcttgctgtgttctcacatggttttgtctctgtcctgatctcctcttcttatcaaggacaccagtcaatttggattagggcccaccccaatgacctcattttaactaaactacctctttcagggccctatttccaaatatagtcaatttttttttttttaatctgagtcttgctctgtcaccaggcgagagcgcagtggtgcaatcttggctcactgcaacctccaactccctggttcaagcaattctcctgcctcagcctcccgaatagctgggattacaggcacacaccaccatgcccagctaatttttgtatttttttagtagaaatggggtttcaccatgttgcccaggatggtctgcatctcctgacctcgtgatctccccgcctcggtctcccaaggtgctgggattacaggcgtgagttaacattcctggccccaaatatagtcactttctgaggtactggggttaggactccaatatataaatttggatggggacacaagttagcccctaacaccttattattaatgctttacattagtatatttatcacaatcaataaacaaatattgatacattattattaactgaagtccatatcttatttagatttccttcattttcacctaacaaactttttcagtcccagatgctatccaggataccacattacattttgtcactgttatgtatttaaatgtttgcgtcctctcaaaattcacgttgaagttctaaccctaatgtgatgctatctggagatggggtctttggagggaattagatttatatgaggtcatgaggattagtgtcctataagaagaggaagagaaaccagagcttgatttatactgacaccttgatcttagactatccaacctccaaaactgtaagaaacaaatatctgctgcttaagccattcagtctgtggtattttgctgtgccagtagactaagatagtcatcaggtctccctgagcaactcttgactctgacggtcttacagttttcttgtttttgatggccctgagagttttgagagtactggccagatattttgtagaatgtccctcaattgggatttgtctctttttttctcattaatagactggggttatgagttttagagaggaagaccagcaaggtgaaatgtcattctcatcacttcgtatcaagggttcatgctatccacatgtcctatcactgatgttgttgacattgatcacctggctgagatgctgtttatcaggtttctccactttctcccataatattactcttttctccttctttccatactgtattctcacttacagaatgggaagtttaggacttcacatgttatttgtaaaacagcaggactggattagtccatttctaagtcatctctagtttgttccttataatcaatgagaagtactgtcctgattgaaaaggaaatctgtattcacagaacagggtgagagagcaggatcacttaggttcaaacccttagttttaaccgtcttagcgttctttctgaacagagggactacaaaaaaccattgtgaatgtagcaatttaatgatctacttttttgcaagttggcaccatattatgtattgatcagccttggacagatcactgtgtccagactcaattctgaaaacttgtggagggttggagagtaggggtatgtctattcttcacctaacaacactgatgatgatgacactgttggtcataaagcaatactcaataattttgttgattgctgatcagttacttcaaacacaaacttgtagaccattttctttctttctttttttttttttttgagatggagtctcgctctgtcacccaggctggagtgcagtggcatgatctcggctcactgcaagctccgcttcccgggttcacgccattcttctgcctcagcctcccaattagctgggactacaggcgccccccaccacgcccggctaattttttgtatttttagtagagacggagtttcaccttgttagccaggatggtctccatctcctgacttcatgatctgcccaccttggcctcccaaagtgctgggattacaggcgtgagccactgcacctggctttgtagaccattttctagaaccaacaggtaaaatttactagagattttatcttggacgtgaactctaggtagtttacatttcttattctagcatatagtgcatgcattgagattctaccaatataaatatgtaaaataaggcaaaataaatgaatttcaaaaggaaattaaggtctttaagctttatctatgtgaattatccttaaaatgtgaagaattgctagctgttttttatccaacttcttatttcctgcaccagtttgaaacatactctccttaagaaattcttaaaagtttccaattactgtaagaataatggaaatttttctctttaaataacccgaacattaatttgttgttctttaacaggatttcctttttaatgattataaaagctcatctgtccatgatatatagcaatgtacccatacaatatgaaattgtattttacccataaacagtcttcaaacaagacacacaattttcttgcttactggctaattaaaataaaatttaaacccacattaaacttgattacattgtcaaaacacccacatttttaaaggagaggcctacagtgttaattcagagagagtgattctttactcttcagctaataatcgcttcagtattaataataacttcagctaaaaatagcttcggtagtctcagatttttaaaatcatgtcaatgtaatcatgcttttatgtcctcttcatttgtggaaaaggaaacaaatgatttgtcctatgtatgagaagatcttttaaaatgaagtttctagggtttccaagttggcaaaacgtttgtcagtatcatcatttggtttgtagaccacattgattcatatactggctacactgcatattaattgcagtttctttattatggaatatttaaaatgcacaaagatacacagtgaactataataaatacccctatgcgcccacctccaggaaaagtaatcattgtgtttttaaaaaataaaacatcatactggagttcctctttgtttcatgttcattctctttcttcctcaggagttatcagtgtgctgcagttgatgtgcattttactcttcgttttatcatatctgcccacaaccacaaatgccataggactgtgttttgtatttcaacattttatttaaactgtatcatattttctgtatcattctatagcttactttcttgactccatatgtgaattcaagagaaattaatgttgatgcatgtagtctagtttatatttttggctatctagtattttgtcatgtaaataaatcacaatttgtttatccatttcccctatgatgagctttaagttgttccacaaagttgagtcttgcaaaggttgctagactgaacatccttgtgtattcttgtgtacgtcaactgtgccagttgtggggggagaatatacctagatgaggacttgttgggttggaagacaagttaacttcaattttaccagatagttccaaattactctttggagtgattgtagcagaattcactcccgagtaaatgaaaatttctatttccaaatatcctcaccatatcctcagacattttaaatatttaccaatctgataagtattcttcttgctctcattttcctgatgactactgagattgagcatttttcatgctttttcttgtttcactttaccttctttttctgtaaattatttattgccttatctttttattgcttcataagagttctttatatatcttgggtattaatgctttggtatgcaactagtaaatatctcttcccagtttataacttgccttttaatttaactttttaaatatgtattgactaagaagttagatactagtcatttaactttatgtaattttttattctatagataatttaaatttcggaacagccatatatatgtctagtttcttttcattttgtctttcaatcagctctaataattttctcaactgagatcttgtatgagtttcatttatttttaactatattatagtttttgtttttcttttttaatgagctttttaaatttacattttctaaatgattttttgctggtatatatgagcactatggatggttgtacattaatctttatatgcaacaacattgcttaactctcttgcttttccctacaggaaaatatattaaaataaccatttttttctcccttttcaaaattaattcctattttttgtcttattgcattcattagaaaccccagtacaatgttgaatagcaacattctgtcttcttaaccttaaagacaatacttctagagtttccctattaaatatgaaatttgctatatttttggtatatggccaaaagatgtacatgtaagatgtatcagtcaatatttagatttggaggtaacagaaactcaccccaactatcttaaactgaagttgggtaaatctgattctttaggtcgctgctgagaactccattacggacatcactgcttcttggtactcagcactaattccatcatgttctcattttcatagctaccagaaaaacttctccactgttcttgtatcttactgtcgctctcttgagagtcaaaggcctagatgacagcattcaattagctggagctaggaactaacatgactgagttgggtttttcctttcttgtacgatccaggcccagttttggtgtcaagattgtactagcttcataaaatgaattgaaacacttttctttttccttcccttccttcctttcttttcttctttctttttttttctgaaattgattaagaaaaaaagtatcaggtttttgaaagtttggtaaattgtaaaaccattctggttagtgcatttttagggacagggaaaatagatagacaaaaataataatttattcagttattagttgtctgttcaggctttgctatttctattttggtcatttatattttttggatacatcagtttcttttaatttttaaaagctttgaagataaagctattcacagtattcttttaagttattttttcaaatttgtacagtatttatagttgtcgcttctttttcattcccagtacaattatgtatcgtgctttctcttttcttttgcttgaccaattttgctacatgtttatctattttattagttttttcaaaccagtttttatactagttcatcaggttctaaaaattatgctgcaatacttatggcctaaaaggaatagtaattataatttttagtcatatgtagtaactactaggaaaaactttatttttctgttttaattacattaaaaagtcccctggaaaatatgagttaagtgttttctcctgcggagattgcagtgagccgagatcgcgccactgcactccagactggcgacagagggagactctgtctcaaaataaataaataaataaataaataaaagctttttcctatctagtttttacaaggaaaatcttttttatttatttattgattgatttgttatcataatactttaagttttagggcacatgtgcacaatgtgcaggttagttacatatgtatacatgtgccatgctgctgcgctgcacccactaactcgtcatctagcattaggtatatctcccaatgctatccctcccccttccccccaccccacaacagtccccagagtgtgatgttccccttcctgtgtccatatgttctcattgttcaattcccacctatgagtgagaatatgcggtgtttggttttttgttcttgcgatagtttactaagaatgatgatttccaatttcatccatgtccctacaaaggacatgaactcatcattttttatggctgcatagtattccatggtgtatatgtgccacattttcttaatccagtctatcattgttggacatttggcttggttccaagtctttgctattgtgaataatgccgcaataaacatacgtgtgcatgtgtctttatagcagcgtgatttatagtcctttgggtatatacccagtaatgggatggctgggtcaaatggtatttctagttctagatccctgaggaatcgccacactgacttccacaatggttgaactagtttacagtcccaccaacagtgtaaaagtgttcctatttctccacatcctctccaggacttgttgtttcctgactttttaatgattgccattctaactggtgtgagatggtatctcattgtggttttgatttgcatttctctggtggccagtgatggtgagcattttttcatgtgttttttggctgcataaatgtcttcttttgagaagtgtctgttcatgtccttcgcccactttttgatggggttgtttgtttttttcttgtaaatttgtttgagttcattgtagattctggatattagccctttgtcagatgactaggttgcgaaaattttctcccattttgtaggttgcctgttcactctgatggtagtttcttttgctgtgcagaagttctttagtttaattagatcccatttgtcaattttggcttttgttgctattgcttttggtgttttagacatgaagtccttgcccatgcctatgtcctgaatggtagtgcctaggttttcttctagggtttttatggttttaggtctaacgtttaagtctttaatccatcttgaattgatttttgtataaggtgtaaggaagggatccagtttcagctttctacatatggctagcccgttttcccagcaccatttattaaatagggaatcctttcctcattgcttgtttttctcaggtttgtcaaagatcagatagttgtagatatgcggcgttatttctgagggctctgttctgttccattgatctatgtctctgttttggtgccagtaccatgctgttttggttactgtagccttgtagtatagtttgaagtcaggtagtgtgatgcctccagctttgttcttttggcttaggattgacttggcaatacaaggaaagtcttaacagatgtacacaatttttgagacatataagtaggttttttctccaataaacagatgtttataaaggatttgtacgtgccattatgataaactacaaagataaatacacatgctctgttctctaagagttttccagccaataaaaatttacagctactctttattgtccaccatactctgttatgagccatgggctttagtaagttctcatgacattgggcactgacttcctgggagtgtaagtgactcacctggaccccacagccagtgagcattagtgcttatattccatcctccaaagctctttcttcataccagaccacacatgtggcccaaggagggatatttactctgcacttttagagttctagaaaacattgtttagtggtctggcatcatctatatttacttggcttgatttgggatagagtataatcctagtcctcgatgaaaggattttgatgagttaaccttatggggtgatgggatttatgggattatttccacacttaaaatgatttgtgggaaaaaaaagtgtactaatccctaatttaggattaagacagatatacctatgagatatgggtctataaaattcatcataatttgagaaatgcaacaaataatcacctctaaaatatcttgttggttcagttattttagtccaaaagccagttggagatctgttctgtatcaagggctccagccctcttgtgagaggtagctgtttttcattcgcttgtagtcttgaagtaaaaacaatgtcagggacggtctcctcagaaccccagagggtctgccttttaggaagtgtttgtcccctcagaaacgagaaaccagatgagctgagtttaggggtcagaccagaggaaatggctggaaattagaggtctcctggctaattcacatgatgccaaataacagtctttctgttgggtgtcagaatccagaatggtgggaaatttgtatctaggggatataaaagaaaatgaatgagataatatatgcaaacagatgagtagagtgcctgaaatgtactaatagccttcagtagattccttctccaatttcaccccttctccatctcaggtttggctttcccctggacctgtcaataaaaaccctgagagtttgattgaacaatggcactgtatggtcaatgctaccagactctttaacatgccttgtttgccacaatttcattgaatgggagcagaatggcaaccaaaccaaggctaacagactttgtcctagaattcccacaccaagtaggaagcataaaataacttagagacttgactatagttcctgcagctattagtcatggtgtgttagcagaacacaatctcagaaagttatttcctaaatgccttccaaagccttggttcttcatgcagatagttttggccaactgtaatggcagtgagaaacttcacgagtgtccagaagaacagaatttatactttaagtttaactttgttttggattgaatgttccttaaaaataaaccttcacctgattcttattttcatttcaattccatgggctggtgatttgagtgtcagggatagagttcttagaatctgtttatgtggtgtgaatacagaaatggtctgattctgagtattaggatcatgatcagagttttgatataaactcaaaacctcactaagccacatgttattttttgaagcatagaaattggactttgcaaacaaccaaaatccttttgtttgagaaactctaaataagcattgagttttcttgccatgaagttttacactgtatctagaaagtttctttgaaaaattcctctgtaaacctaaggctgacaaagaagttggctagttgaagggaaaatgatacttatgttttgtggcaagggggaacaaaaggagggggaaaagtaattactgtccacttaacattttatattaaatttctaatgcataattttcaagacgggcaagagttttggtttgttttaaccaaatatagttacaatattaaatacgtgttctaaatccagcatgtgaatatcacttcttcaaaaaatttttaattttttaaattgaaaaataaatatatgtatttatggtgtacaacgtgatgctttgaaatatgtatatatcgtagaatagctaaatgatgctaatttacatatgcattaccttacatattcatcatttttttgtggtgagagcacttaaaatctgctgccttagaaatttacaagtacacaatgttattaactacagttaccatgttgtacaatagatatcttaaacttattcctcctgtctaaccgaaattttgtatcctttcaccaacatttccccaacccctcatccccccactcctcaccagtaaccatcattctactctctgcttctgtagttcaatttttttagattctacatataagtgagatcatgcggtatttgtctttgtgtacctggccaatttcacttaacataacgtcctctagtttcatccatgttgttgcaaatgacaggatttctttcttttttaagactgagtagtattctattgtgtatatgtgccacttaaaaaaaatccattcatgtgtagatggacactttggctgattccaaatcttgactattgtgaataatgctgcaatgaacatgggaatgcagatatctctttgacatactgatttcatttctttgaatatatgcccataagagggattgctgaatcatatggtggctctatttttaagtttttcaggggcttccatgctgctttccacagtggctgtaccaatttgcaatcctaccaacagtccacaagtgatccattttctccacaccttcaccaacatttatctcgtctttgtgttgataaccatcctaacagatgtgaggtgatctctcactacggttttgatttgtgtttccctgttgattaatgatgttgagcatttttaaatgtttctgttggctatttgtatttctgtatgtcttcttttgaggagtgtttccaggtcctttgaccatttttaatgggttatttgttttcttgctattgagttgagtttcttatatatactggatattagcccctcaccagatatatagttcacaaatattttctccttgtccatgagctgccttttcattgtgttgtttcccttgctatgcagaagctttttaatttgatgtaattccaccttttgtttgcttccttttattgcctgtgctttgggggtcatatctaaaatatcattaatgagcagcttttccccattgttttcttcaagatcaatgtcaaagaggttttcctttctgttttcttctagtttgaggacttatgtttggatttttaatccattttgagttgatttttgtgtctagtataggggtctagtttcattttttggtatgtggatatacagttttcctaacaccacttattgaaaagactatcaatttattaaagaaaagttttgatttgttttatccaaacacagttacaatgttagatgtgtgttggaaaccagcatgtgaatgtcacctcaacaaattttaacaacagaaggaatgggaacagcaaggggatgaggaaataaacagaacataggatttaacaatcaatgggatattaacacatttatgcctgaggttgcaattttttgcatttttgcaatcagaccttgcaatgaccttgagcagtaagatataataactcccatgcttagcgttccaataatggaacactaggcataaatgggtttaagggcacttggggtcacagatgtaagcttagaaggggattaaatgtggccaatgccttgcttttgcccatttaaaaaatttcaactaattctgatgttgttctaacattctgtgattacaggatggtaagtttgcatggtggaagatcagattgggcaccaggataatggccacagggacctcagtagagctcccagtaactcaagggcaccaggagtatgtaaggagtggagagagtgcacaaagaaaaacttgacccacttcataatttaagctaatgtcaatccgcctggcacttcagagtcttatttctcaaaacgtggccccagaacagctggtacccaaatgccctgtgggtctgttaaaaatttaagttcccagaagacactctaaaccagtggaatcagaacactgggaatggggtctgagaagatacattccaaacaaatagcctaggcaattcttaggtactctcgtgattgaacctctgcaccaaagagggaaaagtataagttagaaaggaatttataagcaccatacacaaaaatagccatgactcaggcctccacatctcatttgtgctgtcacttcccctgggaagcctgatcaccccaaatgccgcattgtataatcttttttttttttttttttgaaatggagtgtcactctgtcgcccaggctggagtacaatgacatgatctcggctcattgcaagctccgcctcctgggttaaagtgattctcctgcctcagcctcctgagtagctgggattacaggtacctaccaccacacctggccaattttttgtattgttagtagagatgaggtttcatcatgttggccaggctggtctcgaactcctgacctcaaatgatccacctacctcggcatcccaaagtgcaggaattacaatagtacctaacatactctattgaattgctggcttttctttctctttagcccatgtaatccagtgtcattcatctcctctgcttaacaaagagcttagttcatgaaagccgcccaataaatgttctttaaattaataaatgacttcatgtcttgctgttccaaaatatactccttaacctgcctgaatactttcacttcactttgccaattatttcatttggtatatctgagaattttagtttaaataatgaaatcagtcagttatccagtagggtcaattaattccactttcgctttcccaaagattgtagagcaaccacacacagcgaatgaggaagcagtgatgcaagtaattttgaaacacagttttagagttaaattgtttctggatgcaggcatacaataaatgggtaagtgctgtgtgggggacactgagcaccgaagagttggagggaaagccccagggagttatgaaagggagtacagggaacagggaagaaaaggaagatgtaacctacttatctaaaacttttacctagaaatgaacctgcattcagggtcatggtgggagaaaacactcctcctcctttgatggctgtgacctcctcatagttcctgaacatagcactcaagctggtcctaatcccactacatgaataagtgaaataggctttgagaaactagtctgaaaagttggtcaccctatgaaaaaatgcatgcaaaatcccagaaaacatttcaaaacttttgaaatctaaccaactcagaaattgagcaaagccaagattagatgtgtcttgcagatcaacttagtgaaagcagatgttactcgtgaagacaaaggtcaggaccctagagacataacaagaaatattttatgagaaggaaacttgatgtggattgaaaggcagaagaaatgaaaagaaaaaggcacatgaacatttttaagcaattgtaacagaatgaccaaattgcctgaaccccagacatatgataaatcatataacatgaataggcccccttcaaattggtggcatgcaacatggcaaaacccatctctactaaaaatacaaaaatcagctgggcttggtggcgggcacctgtagtcccaactactcaggaggcagagacaggagaatcgcttgaacccaggaggcagaggttgcagtgagccaagatcatgtcactgcacttcagcctgggtgacacagcaagactttatctcaaaaaaaaaaaaaaatggttgcatgagcaattatagtgatggtgactccagttttgccaagatataagcaagattgaacaggccagaaaatgtggatatgttagtgcaagcaaatcatcaattctttttttttttttttttttgtatttaagttctgaggtacatgtgcagaatgtggaggtttgttacataggtatacatgtgccatggctgtttgctgcacccatcaacccgtcatctacattaggtatttctcctaatgctatccctcccctagcctcccaccccccaacaggccccggtgtgtgatgttcccctccctgtgtccatgtgttcttattgttcaactcccacttacgagtgagaacatgcagtgtttggttttctgttctggtgttagtttgctgagaatgatggtttccagcttcacccatgtccccacaaaggacatgaactcatccttttttatggatgcatagtattctatagtgtatgtgcgccacattttctttattcagtctatcattgatgggcatttgggttggttccaagtctttactcttgtgaacagtgctgcaataaacatacatgtgcatgtgtctttatagtagaatgacttataatcctttgggtatatacccagtaatgggattgctgggtcaaatggtatttctagttctagatccttgaggaatcgccacactgtcttccacaatggttgaactaatttacactcctaccaacagtgtaaaacaaaacaacatatatttattaaacatatgtgtctctgtctgtgtgtgttacacttaggcacataaaagatatttaacaaacattgttgaatggataaatgactgaatgagcagctactatgtgtcaggtgctagaaatagccaaaatgttctaaaagactgtggggaattagcaattccttttagaacaggagtccccaaccctggggccatgaaccagtacctgtccgtggtctgttagaaaccaggccacatagaggaagtgagtggcaggtgagtgagcaaagcttcatctgtattttacagctgctccccatccctcacattaccacctgagctctgcctcctgtcagatcagcagtggcattagattcttataggaaagtgaaccctattgtgaactgcacatgcgagggacctagactgcgtgttccttaagagaatctaatgcctgatgacctgaggtggaactgaggcagcgatgctagcactcagcagcagctgcaaatacaggttaacatcagcagagaggcttgactgcatagaaaccataataaatcaattgcttgcagactcatatcaaaaccctaaaagtgagtgacatgtgacaagtaagctgcatctggtggcaagctttatagtggcaagtgagttgatgtacttcaattgtacagctgtatctggtatccttaaaagtatgtttcagacaatttcaaatctccatatgttctggattgaagtcaaggcagaatatcctgagattgctacaaaagctctgaaaagcctgcttccatttccaacatcctatctttgtgaagcagggttttctgcagtgacagcaaccaaaatgagattacagagtagactggacataagcaacacactttgggtgtcactgtctcccatcacccacagatgggaccatctagttgcaggaaaacaagctcggggctcccactgactccacattatggtgagttgcataattatttcattatatattaccatgtaataataatagaaataacatgcacaatacatgtaatatgcttgattcatcccagaaccatgcccccgaccctgccagtctatggaaaaattgtcttccatgaaactggtccctggtaccaaaaaggttgggaaccgctgctctagaatgtcccccttggctgaggagtccctgatcaaccactgaggctctgcttaagtgttccctcccctgcaaagtctactatcaccctaattaattactattccactgaaaagctcatcccaccatcttacactggttagatgttttacctgcttgtcttcattactaggataaggggaaaaaagattctgggtttgttccatatttgttttccccaaatctactgtttgtaatagggaaagggagaaaggaaaggcataagaaagagaagagaggacagtaggcagggaaagaaggagagcaaggtgaagtaaatcatgttcttttgcccctaaggaaattatgttacatggtaggtttgttgttagatactgagaccctgattctaccttatattcaatggacattgtttaattgcatttattgctttaccactctggaaagaaatgtattaatttaaaatgttttggatcaattatttctttttattacagttcttacggcttattgaaaccactcagcacacttttaaatatgtaaaatgtatgatctgagtcatgataaaaaagaaatttcataggtaacagcatcagtaaatatgtggctgcactttcagtgctgacctacctatattcttttctgagtttacaacctcagttatcaacaactgacattactcaatagttggcacatggcatccaatgcatggacttgaaagtaggcttttaaaattacagtaatcggccgcgtgcggtggctcacgcctgtaatcccagcactttgggaggcggaagtgggcagatcacgaggtcaggagatcaaaaccatcctggctaacatggtgaaaccccgtctctactaaaaatacaaaaaaaaaaaaaaaaagccaggcgtggtggtgggtgcctgtagtcccagctacttgggaggctgaggcaagagaatggcgtgaacacgagaggcggagcttgcagtgagccgagatagtgccactgcactccagcctgggcaacagagcgagactccgtctcaaaaacaaaaacaaaacaaacaacaaaaaaattacagtaattactgtgggcatgataattgtatgtgtcaacttgtgttgtgtgccacagtgtttccagatatttggtcaaagagttttctggctgtggctgagggggtgtcttcgatgagattaacatttgcatcagcagactgagtgctatgatttgaatgtttgtgtcctcctctccccagaattcatttattgaaactaacccttaatatggtggtattaagatgtggggtgtttggggccgggcacggtggctcacacctgtaataccagcactttgggaggctgaggcaggtggattacaaggtcaggagatcgagaccatcctggccaacatggtgaaaccccatctctactaaaaatacaaaaattagccgggcatggtggcacatacctgtagtcccagctacttgggaggctgaggcacaagaatcgcttgaacccgggaggcagaggttgcagggagccaagatcatgccactgcactccagcccgggcgacaaagcgagacttcatctcaaaagaacaaaaaaaaagatgtggggcgtttgggaggtgattgggtcatgaaggtggagcgctcattaatgagcttattaaggagattactgcccttagaaaagagcccaagaagtctatgtgctccttctgccatctaaggacacagctagaaggcaccaaagagcaagtccccaccagacactcagtttgctgtgtgcatgtggagatctcttggtgccttgatcttgggcttcccagtttctagaaggtgagaaataaatttctattgtccataaattactcagtttaacatattctgttatagcagcccaatggcctaagacactgagtaaagcagattgacctgaataggctataaatggaaaggaaaactcttcctgcctgactgcttgatctgggacatcagtctttatctgtcttctgactcaaactaaaacatcagccctttggggagtctcaagcctactggcttgagataaggggaaagacccacccccatgattcaattaccttccactgagtccctcccacagcacatgggaattcaagataaatttgggtggggacacagccaaaccacatcatcagggttttcttacatagtgttgataatcctttccagggtactgggtgtaatgagccttaaaggtctttaggaccctgatgtaaagactaaattaaagatgtgtgtttgggggcaagtagaccacttcagcacctccagtgttgaactcatggagttctgggtggccaggggcattgttcaatatcaaaagaaccttaaatggcagtcccttactggcaaggtacctcctgacttgagggacaaagcataaatggagtcaatccagaaaaagagttctcattgtacaggccttcttgtacaaccaaaagattggcaggtggtgtttaacttttcccttcaaggctcaggggttagctgctttatagataagggcagtccttatcataaaccgaactgcatttgcacaaaacagtagaggtagcccatctcttcctgccttaaatcctggtgctgacttctttttcttactaataaatgtccttcatggcatttttttgcagaacagggcacctttatttgcattaaaaacctatttagtacacctactatgtaccccctaaaattttaaaaaattaaaatctatttaggcagatattcttctcagtgattgtcttaatggtgcctgggaactcatctgctgcctattggttggcaaaacctgattctcctgttatcgtcacatttttaaaaccaaacatctttctaaaactatcacaccatcttttgctggcattaaattcttcagctttagttcctttaacttccttttactttaagttgttatatgacttcactttttttcaaataataatagagtatttaggcatggtttttttttgtttgtttgtttgtttgttttagatggagtcttgctctgtcaccagtctggagtgcagtggcgcaatctcggctcactgcaacctccaccttccgggttcaagcgattcttctgcctcagcctcccgagtagctgggactacaggtgcacgccaccatgcctggctaattttttgtattttagtagagacagggtttcaccattttggccaggatggtctcgatctcctgacctcatgatctgcccaccttggcctcccaaagtgctgggattacaggcttgggccaccgtgcctggccaggtatgcctttcttatagcaattctgcaccgacataaaagctccattttcaatatgagataaaaaggtattttgcaaaaagtataagtttttatacctgctggtgtagctgcagtgacagcctcatgaattttctttcttttttaacaatgggccttgcactagattcatttatcttgaaatggcaggcaatcgcagctgcagacctccatctatggtaaacatcaagcagttcaactttttcctgtcatgatttttctctgcttcttgggagcactttcagcaacactaatggcactttgtatagatcccatggtgttattcaaggtttacagtattgcactaaatataatgaaaaatatgtgagaacagtgagaggtcactttttactgtcatatggaatttactggagacacaaactgcttatacagagataattagtgacatgaaattttaagcagatacttgcaacacctgagcttagcacaaaagcaacaggagctggctatgacatttttgcagtaatacagtatgtacagttaattgtatgcagtaatgatttaatactttatgtttgctcacatttctcttgactgtgaatggtacatgtgcagtctgtatttgggtttgaaagttttgagaaattttaactttttataatagatttgtatgtattttatcataatgtatgataaaacagatgagtatatccctagcttttttcttaatttctttttatatttccaggccatatggttcaactgcaagtttttaaaaattgttgcaaatctccaaaaaaggattcaatatgtttattttttaaaattgtatataattaaacttgcagttcaaagatagacttgaaccctaattattccaatggataaatcagtataaatatgtagttattttttttttaacatgagaagagatgggaagttggttttggacaaatctgaagctgtttctatgatattctataatattggtttgtttccttgatatttatgtatctttcacataaaaataaaatataatagacaatacattaaactgggagcccagaaactttggttctaggattgaattatatgtgagacattcaataaatcactgaaccttctaggcttgagttccctcactttgaaagtgaaaggatgaaatatttagtttcaggatactaaagacatcttgatccctaaactgctttctggaaaaaagccaaaagcaacaaggaaatttagcagtacacactcccatctgtcattattagaaaatcttcattaacttcaaccataatatatatgaagaaaggctggcaagtatagtgaatttggaccagagagaggcaagaaactgaaagaagatggttactggacctcaaaggatgacagtgcagaggtctttgaagtaagtgatacacatcaaggggtaagacatgatagaacaagatggatggcctcaaggagctcctgaaaccccacaagaaacccctccaatgcaggggatgtgatgacaaatgaagacacatgcagacaagctaactctacaagaaactatctgtttggaagaccagatgagaaactgaatgataagcagcttgaggctgtcaatctttatccgccattgaatgtaaactccagggaggcagaaattttttttctgatttatctattgctgtattctccaaacctagagcagtacctggcacaaagcaggtgcacaataaatatttgtatgatggatggatgagtaaagaaagattacagctaaaccacacaatcgacatacttgtgtgtatgtgtgtgtgtatatgcacacgcatgcaaacatgcaaacattaccctgtcacctctagagaaaaatcccttcattattgaaaaggaattaacataggatttatgcaaaaataaccctatttacataaagaagcaaggcaacaaaacaaataaaaatcataaaaagggcaaccaccaaaaatatttttattgccctagagaaggtaaaacttgtgaccaaagttatctgtgagttcataaaacttaatgaataaggtgacctttctgtgttaggactccagagtgaagataagaagtctcaaatttaaaaaaagataaggcaataaaaaatgttaaaaaaggtatttggtagatcttgggatagaagtaaaagagcaaaataaaaacatcaaagaaataaaagctttgggccaggcacagtggctcacacctgtaatcccagcactttggaaggtagaggcaggcagatcacctgaggtcaggagttcaagaccagcctggccaacacagtgaaacctcgtctctactaaaaatacaaaaattagctgggtgtggtggcgggcacctataatcccagctatttgggaggctgaggcaggggaatcacttgaacctgggaggcggaggttgcagtgagccaagatcacgccactgcactccagcctgggcaacaagagtgaaactccatctcaaaaaaaaaaaaaaaagaaaggccttaatgggaacagcaatgttgcccatgttgaaaatataagtgaagacattcatgacatcttgagaaagtggagcaaaatgaaatagaaaagaaaaaagactagagtaggaaaaaattgtagatcgagaacacaggggaaattgacaggtacaacacattggatttttattagaaattatatgtaaaacattcaatattcttgtttttaaagacaaaatcagaaaaaaatggagaacaaaaatatccaaagttatatcaaaaaactcctgaaataagagatttgaatctgtagaattaaaggacacacaatattccagcaaacataaatatctattaatttccatgcataatctagtaaagttaaggaacttcaaagaaaaataaagaacccaagagtatctaaaaaaggtgagggcataaatatcttatctgaaaagcaaaagaataaagctagcttcaaatttctctccattcagtgctaggaataatgaaatcatcaagttctcagggtaacaaagtatgacccctaaattatatacccagacacaccaggcttgtttcttctgtccatctgtgcaataactttttcaaatgtgtaaaacgtaggggaaaaaaacctacatgagctttaaaaaagctgttagccaactaggtcaaccaagatataaatgatgagctatgagcattaagtcattttaaatttaaaactaaggttaaaatgacttcaggaaattagggtgtgcagaacagaatagaaatgtaataagttatccctttataaaaataatataactaacaaaaatcaggagcgagagggaaatgaaaatgggagataatttaagtaccaatcttctcatttttaaatatattgtttaaggctgatctgagactaaggctgatctaagattaagcacataactaaccaaaatgagtgtagcagaaaagaaaagcaagaagatggaagtaactggacatattctaaaagcatcattcatagtgagaaattaataggtactgtttaaaggaagagagaccttacgatacataaagttatatcttacaaagtaacaaattactagaggaactcaagtagatcataagcctttcatattatgaaaaattgaccttagaaatcacagaccaatggtaaaatattaaaaacaaagtgtaatgaacttatccttccaggaatgctggtttacatcacataaaccactcctggtaagaaaaattagcaaagcaggattcaaaaaaatttaatcgcaaaatagtaaacaattatgaaacaaagaggagaaaaagggaaatcagagaggtaaatcctaggaacgtgattcaaggaatagttgagcagaggtttggcagcactatagggctagacagtaagaaaaaaaaatctatcaagaaaggatctctgataaaccccctacattgagttgggatcccaaagggctccatctagtagtaaggggtagctggaaaaaaaacttgggacagaagtccagttttcaaccatcttagttcctctaattggattacggtaatataagattgctagttcccctaaccaactgccatgagcaaatggaaatcctaccaggaaatacaattttaggcttcaaatgatttcaacactttttgtatacaacatcttgcacacaataaaaagtaaccagacaaatgagaagagaagatgatgtaataaaaaattgagagaaataccagcaacagaaatgaatgcacaggagattcagaatatgaataatcagacattttacaatttttaatagagaaaatttttttaaacccaaaatggattctttgaaaagactaataaaattgataaacctttggtaaggttgattgaggaaataaagaatcagaaataaaaaaggagtctattatcacagagcctatagatatttttaaattatattatttaaatatattaactttatgtctctaaatttgaaatttttaataaaatggatatatttctataaaaaacaatttaccaaaactgacatatgaagaaatagaaaatatgaatcattctgtaacctttaaaagaattaaaaaccataacaaaggccatcatgatttccccagagttatttaactcccttttcccatgtaaaatttacttccaaatctttgagaaggcattccttacttcagcaataggaatcttcagggttttttttaattatgaggacatattttcccttcctcatcttatttaactcagtgttataaaactgttctatgatttacttttgaggattatatatattagcttctcatatatttcataccctaggagtttagatcatatagcatgatagtgaagggagaaagggagaaaagtgggagacatggaaggggagcgaaaagagagctgtcctgatttggattgttacagttccatatctgcacccccagcagtttatttatgatggagagaaaataagtaaaaatatatgtgacttgattttcagtttgaaaatgtgttaatgagaaaaaaacccaaatcaatctaattctttatgcttactttatggaaataaaaaatttctgtactatgtggtagaaatgagtgtgtgccattctgggaaactgttcttcagaccacctggtgacctatcagttaatcaaagcatttgacattttttctaaagaaaagagggtgaaataataacttggcctttcttaaaaaaatatacccatggattctgtatccttgccagttgtctattacatagtttgttgagactgcccaacgttgtctggaatttccaagcctcagcgctataaaaataattcactagaactgcctcaaaataatttatattgtgtaattacttaacactgcactttggactacagtatgggatggatatgctaggaattatgctgggttcagtgagagttctgcacaaaggcctcttttgccgtaactaccaggttcttgatgtttaaggaattgtgttgataggccctagaaacttaggacctacaattactggagcatatttattgcagcacagaagagagttgatggtggctgatacaatattggtataaacaaggtcactagtgttccagtatgaacattcaagagcccttagggaaaacaaagaagtcactttcacaaagaactttcaattgcctgctctctgatactaaaacagaatttaaaaatgaacctagttcattttttttcttgtctcttggcgaaaagaccacagaaaactgatccttcacttaatttcaagcaaaaattgtattgtttttggtgaaatccattttttacctcaaggattcagcctaaggttatcacatcaaaatatattttctttaaaaatctgaagtttggccttgaattttaaaggaaattctgcttgaattattatataggatgaaatatttaagtattaatctttttttctctctttcaatgaattaagacaaatacaagcaccttttaaaaatcaggcagggaaataaatgctaattaaattctcttaccagtagtttttcattttgtgaaacaaacttttctagatcggatagactttactgacgagtgtttttgataatgctgaatggaattgagtatgacctcccagatacagatgcatttggacttctcatccacttagtctttttcattcaaactggaaaatcatgtggtttcatttttattatttttttaattgagaggattgtcaggagaaaatatgtatgtggctttatttttattttaaccaataagattgtcagtaggaaatgcattctgaatatagcacacatggggcaaatgttcctttttggtcatgacattttttcattataatggaggtttgccagggcatataccatgttttaatgccttttacatataaaatcacaacaagataagactttagacctctctgtaaaagctgcggtataatgggaactagcatgctctgactggttgcctcaattaataaaacagtcaggaaatctcgagggtttccttccacagatttgagtatcccttgatgacctgcataaaccctagttcttataaatctgttcactctcctgcaccggaggaaggggagatggaaagctggcctgttggtgacatacacagcattatgcttagaaaagtatgggtttcttccatgctaccatcctactcttggcatgaaattatactttgtgatcctacagtcatacatatgaaggaactacacacataggagacagcgtgaccctaggctctgactgggtatctttgtttatattttgataaagaagtttatggaaaaagttatttttaattgaacaataatttgaggcatggtaaaaaaaatatgtattgtctaggaattattatttaatatttagaaaaaaacatgaggctttaacttgaagaaataaatatattttcagggaaaatctatgttgtttcttatttatttgcactttggtactctagaacaccattaggatgtcttgtttcagattttaaaggtaggtattatccctgtgatccttcgtgtgcaaactagcttagcaacctgcgcccaggagagtaaccacagaggcagtggatctatcccatgctcccttgcatgaaccagcctggcactttgcccacagggaagcagcgccagaaccagcaaactagccacacaaactctagcagcctaggtcacagaggcacttacaggcatcactgacattgactatagaaacttcagagaggctacactactgtcctcacccagaaccaaagccaatgcactctacccaactgactccctaggacacaccttcaggtgaaagtcttcccctctggaagctactgtataaaactggaagaggcaattcttccaccagatgcataggtatcaacagagggacacaagaaacacgacactgccaaataagcacagtgattccccagttacttaacacaaagaaatagaaatttatgaatcttaaggaaactcagatacaagagaacatagatagacatttcaaatacattgggaagataatttatgatctgtatgagaaattgaacaaagagatagatatcattaaaaagaaccaaacaaacttccacttgagcagcctgagacatccatgggtgggggtattttctccctcaactgttcctaccacaggcttcctgaggtttttcctagtgaggccaagagggtctttgaggaaaactgcatccagacatgccttgagggaaggtgtcaaatgcaggagcatggaaaagagttacaatttggatatgaaaccatttttctagcccaccttagagaagactgttgacacactggtcaaaatggttccaatcgcctaccttgcaagacacttcaggttcaaagaatttcccttgtaaaagcaacaagggagttgtcagagttttccatttagatcaacaaattcaagttcttaccatggaaaattcagagaagactgtagtggttctccttgcttgtggctccttcaatcctgtcaccaacatgcacctcaggttgtttgaactagccaaggactgcatgaattgaacaggaagatagagagttgtcgaaggcataatctctcctgttggtgatgcatacaagaagaagggactcatgcctgcccatcaccaggtcatcatggcagaacttgccaccaagaattccaaattggtggaagttgatacatggaaaaattttcagaaggagtggatagaggctgttaagatgctaagatactatcaagataaactggaggctagtgactgtgatcaacagcagaactcacctacactagaaaggcctggacgaaagaggaattccatgagctgaacaaagacaagcttctagtcaaaagagatccctagagccaaaaacaaaaggtgcaccaaaagtcaagctgctgtgtggggcagatttactggagtcctttggtgttcccaatttctggaagagtgaagacatcacccaaatcatggcagactatgggctcatatgcattactcaagctggaaatgctgctcagaaattcatctatgaatctgatgtgctatggaaacactggagcaacattcatgtggtgaatgaatggatcactaatgatatctcatccacaaaaatctgaagagccctcagaaggggccagagcatccactacttggtactagatcttgtccaagaatacatcgaaaagcataatttgtacagctccaagagtgaagacactccgagagtgaagacagtgaagacagctccgaaagtgaatgacaggggccatcctggccactttacagagaaacactgcagaagctaaggcatagaaattctgcagcatgatgttttgcactttcctttcagggtttgaaacaatctgggtgttaataactgggaaaagaaattgtggtcctgttgcataaactaaagattaaaagtttagtaaaaatcagtggtaagttaaaatcagggtttttttttttttctttttatcagaagttgctaagatgaatgttttccatatggtctttttctaaaaaaaaaaaaaaaatgtacaattctctttatctttaaaccaagagcttagcagcacacaaaaaccagaagaattttcagtgaaactagctacaaataagaaatcaaaaagtacagcctagctctaccacataaaagaagcaaagtgtgaaaagcaaaagttcacttaaaattctaatttaggttatgaagagaattgacattttatgcatgcctgctgtgggtaatctgcagctagggtagacaaaggaaggaattcttatagtggtgatcttgtaaaatgcaccattgataaatcatctccagttatgcaaaataaaggttgtgcatatgcctggcagaaacattgtaccaatagttagttctctgtggcacacatcacaattgctgactaaagtttggcaagacctatcggcctggagcttcctctttagaagtaggaagtgaagtccaagccctcatatgtttagaaaagtatgcaagttttctgatgcctaccagaggtagagacctgctgccttatactttatacacagttacttttccttgttatgggtcatgctctagccttggtcatccaccctctctttatcttcagaaacaatttcagagttgacatcatgttaccttgaagtgagagaaccacagagaatgagaagtctattcaaggattttatgtctgaatgctcttagcctttattgatagcttaatcagaagatctaagtggggtgcagtggcacatgctctgtagtcccatctacctgagaggctggagcagaaggatcgcttgagcccaggagtttgacaccagcctgggcaaaatagtgagaactcattttttaaaactgtgaagtttctgaagggccctgctgtttctgttccagccaactgtgaatctgccatttgtgaatttaagcagaaaaagggtctgttttctcatatttttttcttcttgcccttttgtatgaagtttaacctaaagtagtattctcaaataattagtcatagcttcatgttaaaaacacatgcttgttacatggttttccactgattaaaattttgtggaaatttcaccaattgctaaagcagaaagaccagaaatagctttttatagaatcgttttggggtttgcgaaaattgtcctatgacagaaacaggactaaagttaaatttctaatgaaaacataataatttgcctttttgcaatttctatttcattcctacacaaacccagatgaagggtttgtaactccagaagaaaaaaaatacttagatatgtgcaattgtatagtcagatctgaatctacagtttaaaaaataaaaatgttaaataaagttaagcaaacatatgtgcttcagctcccaacttactcttactaaagccttcgggccaattcccaaaaaacagggagggtgcaaagcctgacacctagcagctttcaggatccatctgccaagtgaatgaaaggttggaatctcaaatcctacagataagagtcatttttctcctcctcagcttcttggagtttaagagttgaagcggccctgaaaagtaatgattgagcatgaagaagctataagaattgaactttgataccttctgggaaataatacacagtttatctgaagtgttgtgtaaactgcagaaaggttccaatgctagaaaattctctcatactgtcatgccttcccacttagaagtgcccatgccctgctcagctgtgactctactgacctcaggacctcactggacaagtcatgtggtaacccttgcaggagacctgataatggtgaaatgattctattgttatattatttatggagcaacaactttgtacagagaacgagctgcttggctttttcttccaatgccgaggatgctgctgatgctgccatgtaacagcatacttttgggtgtcctcaaggatagaacttcccctctgaataatggaaattagaacaatgaacttcacaggggaataaatattaattactgatgtgaagaaaatattccattgtttattccctaccacatcatttccataattggctgttgtactgtgaatttagaggaaatgggtaatgcttgtgttttgttttgcttctttgtttgatgctgggggttttatgtgttgtacactttaccccttacattgcataatttgaatgcagcaaacaaacccgcaataaaagtcatttattggcatcttcattcagatgaatggagagcctttgtggtagtgtcaaaaaaaataaaaataaataaaaataaaaagaaccaaacagaaattttggagctgaaaaatttaaccaataaaatgaagaaatacaattcagagcttcaatagcagactaaattaagcagaagacaaaaatttgtgaacttaaagacaggtcttttcaaataacctagtcagagatccaaaagaaaaaagaataaaaagaacaaccaaggccagctggacttctgggacaccaactaagcaaacaaatatttgcattatgggatttccataggacaaagatgaagagagacacagaaaggttacttaaaaaaacaacagttaaaaacttcccacgtctttggagagatatgtacatccagctccatgaagcacaaaggatcccaaacagattcaacccaaagaggttctctccaaagcacattttaatcaaatcatcaaaagttaaagacagaattccaaaagcagtgagagaagagaatcaagttacatataagggaatccccactagactatcagcagatttctcaacaaaaactgcaggccaagaaagaaccagataataaatttgaagtgcttaaagaggtgaggtgggggtgcgggggaactgtctacctagaatactacacccagaaaatttatacttcagaaatgaaggagaaatagtgtttctaggcaagagaaagctgaggtaatccatcactgctagaccagccatataagaaatgctagagagaatgcttcaactggatgtattaggaaaataattactagtatgaaaaaaagaaagtataatctcattggtaggagtaaatttattatcaaatttagaatactccattactgtagtggtggtatataaactttcagttgtctagtttgaagattaaaagtcaaaatggtcaatgattactatagctacaacaagttgttaaaatacgtacaggatatgaaaggatacaaagtaagcaacaaagttataaatttggtgggggaggccaggtgcagtagctcatgcctgtaatcccaacactttgggaggccgaggtgggtggatcacctgaggtcagaagtttgagaccagcctggccaaaatggtgaaaccccatctctactaaaaatacaaaaattagctgggtgtggtggtgtgtgcctgcagtcccaggtactcaggaggctgaggcaggagaattgcttgaacccgggagacgaggttgcagtgagccaagattgcaccattgtactctagcccaggcaacaaagcaagactcagtctcaaaaaaaaaatgtttttaataaaaaataaacaaatttgggaggtagaaggtaagtctagaatacttgcatgtagccaaagttaagttattatcaacttaaattgcctattataactacacagtttttaaaatgtaagccccatggtaaccacaaagaaaaaaattacggcagatacacaatgaaaaagaaaaaaaaaatcaaagtttatcactacaaaaaaaatcaccaaaccacacaggtaaactataagagagggaaaaaggaacaaaggaaatacaaaacaaacaaacaaacaaacaaacaaaaaacagaaaatgatctaacaaaatgtcaagagtaagttcttacctatcaataataaccttgaatgtaaatgaattaaattttccaattaaaagatatagagtggctgaatgggtagaagacaaaacccaactatatgctacctacaagagatttgctttacccataaggacacacgtagactgaaagcgaagggatgaaaaatgatattcaatgcaaatggaagccaaaagactacaagagtagctatacttagataacagataattcaaaaattgaaaggggagacaaagaaggtaaatctatactaaaggggtcaattagcaaccaattaaaacaattctaaatagatatgcacccaacactagagcatatataaagcaaatattataacatctaaagagtgatacagactgcaatacaataatagtaggagatttcaacaccctactttcagcaatagatagatcatccaaactgaaaatcagcaaaaaaaaaaacactggatttatactgcactctagaccaaatggacctaacagatatttgcagaacatttcacccaccagcaacctacagaatacacatttttctcaaaagtacattgaattttctccagaatagattatatgttaggccacaaaacaagtctcaacaaatttttaaaaatcaaaagcatattaagtatttttctgatcacaatggaataaaattagaaactgataagaggaagaattttggaaatcgtgcaaatacatggaaattaaacaacatgctcctggaacaaccaatgggccaatcaaaatatttaaaatgaaaatttaaaatttcttgaaacaaatgaaaatggaaacacaacacacctcaatctatgggatatagcaacagcagttctaagagggaagtttatagcaataaacacctacatcaaaaaaatagaaagatatcaaataaacaacctaacattgtacctcaaggaagtaaaaaaagaaaaaaaaaagaacaagctaaatttaaaattaagaatgaagggaataataaagatcagagcagaaataagtgaaatagaggctaaaaaatagaaaacatcaatgaaacaaagaattattttttaaaaagataaactaaattgacaaacctttcgctagacaaagaaaaaagagataatacacagataaataaaatcagagattaaaaagaagccattatacctgataccacagaaatacagagaatcataagagacaattatgttgtgcacatgtaccctagaacttaaagtataataaaaaataaatatatatatattaaaaataaataaaaagaaatagaaaaaataaaaaaaagaaaatctagaagacatggatattttcctggacacatataacctaccaaaattgataatagaaaatatgaacagatcaataatgagtaacaagattcaatcagtaataaaaatttccgatcacagaaaaccatgggacctgatggcttcattgctgaattctactgaatatttaaagaataattaataccaattcttttgaaactattccaaaaaactgaagaggagataagttcatctaaattcattctatgaggccagcattaccctgatacaaaaacaagacaaggacacaacaaagaaagaaaactacaggcaaaaatcctcaacaaaatacaagcaaacaaaattcaacagcaaattaaaaagagagttcaccatgaccaactgggagatggaaggatgattcatcatatacaaatcaataagcatcatacatcacattaataaaatcaatgacaaaactgatgcaaaaaaagcatttgataaaatttaaaattccttcaggataaaatctctcaacaaattaggtatagaaggaacataccttaacatgataaaggccaaatatgataattccacagctaacatcatactgaacacggaaaagttcaaatcttctcctctaagatctggaacaagacaagcatgcccactttcaacactttcatctacccagagcaattaggaaagagaaagaaataaagggtatccaaatggaaaaggaggaactcaaactgtccctgttttcatataacataattttatatattaaaaaaaccctaaagactccaccataaaactattagaactaataaacaaatttagtaaagttgcaggatacaaaatcaacatacaaaaatcagtagcacttctatgtgccaataaaaaactatctgaaaaataaaccaaaaaagcaatcccacttacaacagttacaaaaaaaagatacttagcaataaatttaaccaagaaggtgaaaaatttctacaatgggaattataaaatgttgatgatgaaattgaagaggacacaagtaaatggataaagatatcttgagttcattgattagaaaaattaatattaaaatgtccatactactcccaaaagatctacagattcaatgaaatccttatcaaaattccaatgacagtttttcaaagaaatagaaaaaaccctaaattcgtatgaagccacaaaacatcttgaatatccaaagcaattttgagtaaaaagaacaaagctgacggcattgtactagctgacttcaagataaactacaaagctatagtaaccaaaacagcatggtactggcattaaaatagacacatagaccaatggaacagaagagagatcacagaaataaatccacgcacttaaagccaattgattttcaacaaacatgccatgaatacacattggggaaagaagagtctcttcaaaaaatggttctgggaaaactggatatccacaagcagaagaatgaaagtagaccccgtctttcatcatatacaaaaaatcaaatcaatattgactagaagcttaaatcaacactaatgataaaattactagaataaaacatagggaaatccctttatgacactggcctaggcaaagatttttttgataacatctgaaaagcataggcaacaaaagcaaaaattgataaatgggattacatcaaactaaaaacttctgcacagcaaagtcaacaattaacaaagtggagagacgacatacagaatgggagaaaatatttgcaaagcatacatctgataaagggttaatatacagaatacaaaagaaacccaaacaactcagcaaaaaaacaaatacagtcatgttccacataacattttggtcaatgataaatgggatctaagtaaactaaagagctttggcacagcaaaagtaactatcaacagagtaaacagacaacctacagaatgggagaaaatttttgcaaattatgtatctgacaaaggtctaatatccagcatctataaggaacttaaacaaatttacaggaaaacaacaaacaacctcattaaaaagtgggcaaaggacatggacaaacacttctcaaaataagatacatccagccaatgatcatatgaaaaaaggctcaacatcactgatcattaaagaaatggaaattaaaaccacaatgagataccatctcagaccagtcagaatagctattattaaaaagtaaaaaaataacagatgctggtgaggttgtagagaaaaaggaatgcttttacactgttggtgggggtgtaaattagttcagccattgtggaagaaggcgtggcgatttctcaaaaacctaaagacagaaataccattcaacccagcaatcccattactcattactaggtatatacccaaagtaatataaattattctcttataaagacatggcacacatatgttcattgcagcactattcacaataccaaagacatggaatcaacctaaatgttcatcaatgatagaatggataaaaaaatgtgttacatatacaccatggaatactatgcagccataaaaaagaacgagatcatgtcctttgcagggacatggatgaagctaggggcaattatccttagcaaacaaatgcaggtacagaaaaccaaatacagcatgtcctcagttataagtgggaactaaataatgagaacacatggacacacagaggggaacaaaacacactggggcctattgaagggtggaaggtgggaggagggagaggatcaggaaaaacaactaatggatattaggcctaataactgggtgatgaaataatctgtacaacaaacccccaggacacaagtttacctatggaacaaacctgcacttgtacccctgaacttaaaagttaaagaaaaattttggtcaatgatagcatatataaaagtgattcaataagatcataatattgtattttttgtgccttttctatggttagatatgcttaggtacacagatatttaccatcatgttacaactgtctacagttttcagtacagtaatatactatacaggtttctagcctaggagcaataagctatacaatctaggtctatgtaagtacattctgtgatgttcacacaataacaacattgcgttgtaatgcatttttcagaatatattccaacccttaaatgatgcatgactgtaatctgattttaaaatgggcaaaagacctaaatagacatttctgaaatggccaacaggtatatgaaaatatgcttaacattaccaatcatcagaggaatataaataaaagtcacaatgagatatcaccttgccccaattagaatgggtattctcaaaataccaaaaaatgacaaatgctagtatagatgtggagaaaagagaactctcatacacttttggtggtaaattaggacagccattatggaaaacagtatgaagtttcctcaaaaaattaaaactagaactattatgtgatccagcaagctcactattgtgtatatgttcaaaggaaatgaaatcagtatgtcaaagagatatctgcactctcatgtttattgcagcactattcacaaaagccaagatatggaatcagcctaagtgttcatcaagagatgaataaagaaaatgtcacaaatatacacaatggaattatatttagccataaaaaatgaaggaaatcttgtcatttggggtaatatggattaatctagaggatgtgatgttaagtgaaataagacagaaagagaaaaacaaatactgtatgatcttactcatatgtgaaatctaaaaaagttgacatcatagaagtagagtgtagggaagtggtgaccacaggcagaagagtgtaggggtaagaggaggatggggagagattagtcaatgggtacaaagttacagttagataagagaaataagttctgtgttctgttgtacagtagggtgactatagttaacgacattgcattgtatatttcaaaatagctaggatagagtgttttcaatgttctcacaacaaagaaatgataaatgtataaggtaattgatatgctaaatgccctgatttggtcattacacaactatacatgtactgaaacttcaccctgtacctgataaatatgtacaattataatgtgtcagtaaaaaacaaaacaaacataagagccgtatataaaaaacccacagccaatatcatactgaatgggcaaaagctggaaataattcccttgaaaactggcacaagacaaggatgccctctctcaccactcctattcaacatagcattggaagttctagggcacgcaggcaagagaaagaaataaagagtattcagattcaaagagaagaagtcaaattatctttgtttgtagataacatgatcctatatctagaaaaccccatagtttcagcccaaaagcttcttaagctgataagcaacttcagcaaattctcaggatataaaatcaatattcaaaaatcactagcattcctgtacacaaacaacaggcaagcagagagccaaatcacgaatgaactcccattcacaactgctacaaaaagaataaaatacctaagaatacagctaaccagggaggtgtaaagtctctacaaggagaactacaaaccactgctcaaagaaatcagaggacataaacaaatggaaaaacattccatgctcatggatagaaagaatcaatattgtgaaaatggtcatactgcccaaagtaatttatagattcaatgctattcccattaaactaccattgacatgctacacagaattagaaaaaactattttaaaattaatatgaaaccaaacagagcccaaatagccaagacaatcctaagcaaaaagaacaaagctggaggcatcatgctacctaacttcaaactacacaacaaggctacagtaatgaaaacagcatggtactgggacaagaacagacacatagaccaatggaacagaaaaaaagaactcggaaacaagtccacacacttacaaacatctgatcttcaacaaacttggcaaaaacaagcaatggggaaatgattccctatttaataaatggtgctgagagtcctggctagccatatgcagaaaactgaaactggaccccttccttacaccatatacaaaaattaactcgagatggattaaagacttaaatgtaaaatccaaaactataaaaatcctagaagaaaatctaggcaataccattcaggacatatgcacaggcaaagatttcatgataaaaacaccgaaagcaattacaacaaaagcaaaaattgacaaatgggatctaattaaagtaaagagcttctgcacagcaaaagaaactatcatcagagtgaacagacaaccaacagaatgggagaaaagttttggaatgtattcatctgacaaaggtctaatatccagaatctacaaggaacttaaatttacaaaaaacaaacaacctcattaaaaaatgggcaaaggacaggaatggacacttcataaaagaagacatacatgggaccaacaatcatacgaaaaaaaggtcaacatcactgatcattagaaaaacccaaatcaaaaccactatgaggccgggacagtggctcatgcctgtaatcccaaaactttgggaggccaaggtgggcggatcacgaggtcaggagattgagactatcctggctaacacggtgaaaccccttctctactaaaaacacaaaaaattatccaggtgtggtggcatgtgcctgcagtcccagctacttgggaggctgaggcaggagacttgcttgaacctgggaggcggaggttgcagtgagccgagattgcgccactgcactccagcctgggcgacagagcaagactctgtctcaaaaaaaaaaaaaaaaacacacacacacatgcacaatgagataccatcttacaccagttcagaatggctattactaaaaagtcaaaaaacaacagatgctggcgagattgcagagaaaaaaagaatgctatacactgtcggtgagagtgtaagttagttcaactattgtggaagactgtgtggtgattcctcaacaatgtagaggcagaaacactatttgacccagcaatcccattacttagcatatacccaaagtagtataaatcattctattacaaagatatgcacacatatattcactacagcactattcacaatagcaaagacgtagaatcaacctaaatgcccatcaatgacagactgaataaagaaaatgtggtacatacacaccatggaatactatgcggccataaaaaggaatgagatcatgtcctttgcagggacatggatggagttggaagatactatcctcatcaaactgatgcaggaagagaaaaccaaacaccacatgttctcacttataagtaggagctgaaagatgaaaaaagagctgggcttatgtccatgtctggttttggtaacagagtaatgttggccttgtacaatgcattagggagaattgccacctcttcaatttttagaaacactttgggaagattggtattagttctttatacatttggtagaattccacagtgaacccatctgatcctgggcttttcttcaatgaaagaattattatttattttaagttctgggatacacgtgtagaacgtgcaggtttgttgcataggtaaatgggtgccatggtggtttgctgcacctatcaacccgtcagctaggtattaagcccagcatcaattagctattcttcctcatgctctccctcccatggcccccaacaggctccagtgtacatcgttccccctcacgtgtccatgtgttctcatcattcagctcccacttggttttttttcatcatcactgctgtttcaatgaaaacataaattcaaaccaatttcacatttactgaataattatggaagctagaaacccacagggtaattacacaaatacaaaatacctacctaaataatatcggacatatactgggtattttggttacctacagctacataagtatttactgtaaaatataaaagtttaaaacaactaccaatttaacatctctaatgatagtgtatatcaggaattggggtaagagatagctgaatcattctcatggcatcatcagagtttactcactggtattcagatgacaaatgggcttttctggagagtccaagatggcattattcacttgtctgctgccttgataaggatggctgaatgctagtctcaggtggaactttgctgcaaggcttcctctaatgtaacctcaaaatttcagaacacacttctgccacattctataatcaagcaaatgatcaaagccagcccagattcccaaagagggaaattggtggccatgtttttacttccataatcagggagaagggcaggaaatatgatccagaacaaacagaaaaatgagttagtagcagcagacacagaatgacagagatgatggaattaacaagaaatgacattaaaacatctattataagtcttctaaacaacctcaaaaaaataaaagaatgcataatcatagtgagaaaaatggaagacataaagaagacctgaaaggaacttctaaagttaaaaatatataaaatgaaaataactggatgagattaacatcagtgaatactacagaagaggaaaaaaatagaacttaaagacttaacaatagaaactagccaaaattaagcccagagaggggaaaaaaatataaaaaaaaaacaaaaaaattgagtgcatcaattacccatatgacaatatcaagtgatctatcttgtgatctatcttatacgtaattggagttccagaaggaaatgagagagaaaaaaacataaagaaaaattttaatgcaacaataatcatatattttccaaatttgataaaaactctaaccccataaattcaagaacctctcaatgaatctcaggaagaataaatataaagaaaatgataccaggacatatcataatcaaactgctgaaaacaagtgataaagagagtatcttaaaagtagccagatttaaaaaatacaaattacctacaaaggaatgaaggttaaaagggaaacaggcttattgtcagaaacttcacaggctggaatacaacagaataacatcattaaagtattggaaaaaacctgtctacatataatggtatatccagtaaaagtgtcttcccatattaaaagtaaaaatacttcctcagataagcaaaagttgagcgaagtcatttccaccagacctgtactaaaaacaaaacacattaaaggaagttcttcaagacagaaagaaaatagaaatttggatctacataaatgaaagaaagaaacaggcatagtgggtagaaaatatgtggttttaaatcaatgtataataattgaaacacacatactgaaaggaaaattaatgcaggagtgttgacacctgaaatgcaaatcaagaatgggaagaactcgctttttggccgtttttcaaataaaattatttttttcctcataaacaacagcacaaacaacggacaccaatacacacacacacacccctcccccaaaatgtttgactatggtattccatatgtctgagtagaatatataggtgataaacatatacatactatttttgaatgcctagcccattgctctgactggattgaaaatgccttaagacaattaggtgttttctccttgaataaaattcactgacaacactttgaaattgtaacgatagatggtgaatttatgaactgccaaaaggcatgtgaaaaccaagaaaaacagttaccctgtgctaaagcccacattgccatttgttaaggacagctcctttccagaacactggacagatgacacatgtttgttcattggctctttttttttttttttttgagacagtcttgctctgtcgcccaggctggagtgcagtggcacgatctcagctcattgcaagctctgccattctcctgcctcagcctcccgagtagctgggactacaggtgcccaccaccatgccctgctaatttttcgtatttttagttgagaccgggtttcaccgtgttagccaggatggtctcgatctcctgacctcatgatccacccacctcagcctcccaaagtgctgggattacaggtgtgagccaccgcgcccggcctgttcattggcttttatatagaagtattaactgaatgcctgctatgtttatggacaacattgtagctaagaccccatatattataattcctgacattcactcaggactttgcaatagatagctcgcttttatatctaccttgctttctcttcataacaataaatgaggagggtggatattattatccctttttcagttgaggttaagaaagccctgactcccaactcatcaccctacttccttcactaaagctgtaatatcctttagactctgtcataaacagaagccttcaggtctcagctgaattcagttttttcatggggacttctcatatacagcagatcttccaataaggtcgttttgttataatgttgatgaaaaaaaacattgattcctggccgggatcactgtccatgggaagttcacacattcttcctatatctacatgggctttcttctgttattattaatatggtttccttccacatcccaaagatgggcatactaggttcgttggcctgtctaaatggtctcaatctgatgagtgcaggggtgtatgtgcgagtgtgtcctgtaatggaatgatgtcaaaggctggttcctactttgctccaagctgccaggatgggctctggccaccagtgaccctgagctggaataagcaggttggaaaatgaatgaatgaataaatacaagttattataaaataaaaaatttttaagtacatgataatcatacaataaacaatgcagtatgaaagcgcttagtgagattactatatttgttgtttgtttctgaactgcgtgatggtaggaggtgcttctgacaatgttcattttgcaaacatttattctttgattgaatctaccaccatgattgccctcactctctgattcaccgaaaattgagtaaatcattatcttgtttttatttttctttcttaaatgtatatatagttcacatttatttcaatgtttaatagtataagtgttttggtctttatttagaagtttggtgatgtttttgtgaccagaaatatgccacaggaatttaactcttgtttatatccattatcctatgataaaattggttttgttatacatcattttcttaaaattgtagtttccaagaacctaaccaggacattaagtgagaatgtactgtactcacgtaggtcttgtattatttcttcatagcatatagttattaaagtgagattttaaaaaaaatgtttggctcccacattggtctcagcttcaggcaggcagaagctttgactctaccatagcaaccccagcactctgaataatgcctggagcatggtaggcactcaatatatgtggtctactaaatgtgtgttggttcctgaaatgcttctagatcaaaactgcatagcaaaggaaggaatctgtctatggttatgtagtttcagaataccatatctatatgtactttataatgaaaagcttgcaggaaaattggctattattactttattaaatgaatttgagtcactcatcctttcttcagattattcatccataaaataacaatgtttgaaaaccatataggtattaaacagtgctcctcaaagcccagatggttctgtgagggttgaggaagagcaaagagatacatttaagtttttttcttttatttacataccaagtaaaagcactacacatattaaatggcagtccaaggctaggtttggttctgtgtccctacccaagtctcatcttgaattgtaatccccacgtgtcaagggagagatctggtgtgaggtgattggatcacagggacggtttcccccatgctattcttggtatagtgagttctcacaagagctgttggtttttaaagtattcggcagttcaccctttgctctctctctcctgccgccatgaagaaggtgcttgtttgcccttcaccttctgctaccttctgccatgattgtgtttcctgaggcctcccaagccatgcagaactgtgagtcaattacccagtctcaggtatttatttatagcagtacaaaaacagactaacacagtttataataaaatgttcccagtaatattgaaggagcactataatgctccctaagaacttagaaacaaatgaaatcaagtaaatttttaaagtaacatacaatggatcataataaagacatataaaatctcttaagggaaacagaataacaccctacaatacgaagaaaacatccatcaggcaggagattgatcagcaataaagccaaaggaaaagtggagtcagagatgagaactctggaaattcccaaccggtctatgtccaggagaaaggaaagttaaatcagtgttcagaccttcaggcaaggtcattttttgtatgaaacaacaatactatgctctcttagcctgagaacattttttaaaatggattcatctcctgttttgattgatttcatgatttcaggcaaacttctgaatatttcatggttccctaaaatagtctgctgagaagaaaaattgctcataccatcacgaatattcagacccatgtgacagttgtatttctcatcatcaataaattggcaaactgatttatgtttttgtttaaaacacctagttagtgttcactatgttcctaacattgttataagtgcttcaaataataatttattacatcttcatagcaactccatgtggtaggtacaatcctataaagataataatagtaaagtaatgcactttttctgttaaaaactatttttaattgacaaataattatatctatttatggggtacagtaggatattttgatatatgcatacattgtgggatgatcaaatcaggctaattaacatgtacaccaccttacgtatttctttgtgatgagaacacttaaaatccacccttttttcaattttgaaagatttgggagattttatgggtcctttccaaaccatcacaataaagtaagtcgcacaattttattttgttttctggtgcatataaaattatgtttacactacatggtgtagtctaccagtgctaagatttctctgtagcatgcaatgctgtttgatagcattttacatgcagtggaatttctttcaaaattggagtcaatcttctcataccctgcttctgctttatcaactaagtttatgtaatattctaaatttctttgttgtcatttaaacaatacgcacagcatcttcacctggactagattccatttcaagaaaccactttctttgctcattcataagaagcaactccttatcgaataaagtttcatgatgagattgcagcaattcagtcacatttcaggctctacttctaactctagttctcttgctattttcaccacatccgtagttacttcctccactgaagtttttaacccctcaaaattatccatagaagttggaattaacttcctccaaactcctgttaatgttgaaattttgaccttctcccatggattacaaatgttcttaatggtatctagaatgatgactcttttccagaaagctttaaatttaccttgtcttggtaactgtgaatactgctgcagtgaatgtggagtgcagacgtttcttcagcttactgatttttattcctttgggtggcatagctggatcatatggtatttctacttttagttttttaaataaccttcatactttttccaaaatagttgtactaattcacatttccacaacacagtgtgtgatggttcccttttctctacatccttgccaacactagctagcattcacctttttgatgacagccatacttacaggtgcagggtgatgtctcattgtggtttaatttgcatttccctgttgagtagtgatgttgagcatttttaactatatctgttggccatttatatgtcttcttctgagaagtgtctatccatgtcatttgcccatttttaatacgagtatatgttttattgagtcatttgagttccttatatatttttgatatgagtcccttatcaaaatgaggccctttgacaatatatttgcaaatattttctcccaatctgcaggttttcttttcactctgttgatggcttcctttgccatgcaaaagattttttagtttgatgcaatcccaattgtctaattttgcttttgttgcctctgctttgggggacatacccatgaaataattgcccagaccaatgtcaaggagcttttctcctagtcttctcttatgagttttacagtttcagatcttacatttaagagtctcacccatcttgagttgattctactatcaagggagagataaagttccaattttatttttctgcatgtggatagccactttttctaacaccatttattgaagagactgttctttcctcattgtgtgttcttggcacctttgttgaaaatcaattgaccacagatatgtgcgtttatctggggactctctaccctattcgattcattgatgtgtctgtttttatggcagtaccctgcagttttggttactataactttgtgatgtattttgcaatcaggtagtttaacgccttaacctttgttatttttgctcgagattgctttggttattcagggtctattgtggctccatacaaattttaaggttgttctatttctgtgaaaaatgacattggaattttgataggattgcactgaatctggagatcactttgggtagtatagacattttaacaatattaattcttccaattcatgaacacagaatatctttccatttctttgtgtcttcaatttcttttatcaatgttttatagttttcagtgtataggttcttctcctccttggttaaatttactccagagtatcttattttttatagctattgcaaatggaattgttttcttaatttttttcagatagttcattgttaccatatagaaacactattaaattttgtatgttgattttgtaacctactttactgaattttattcatcagttctaacaaatttagggggctgagggaggggagagggagagggagagagatttgtactgtactgtaaagaattggttcacatgattatggaggctaagaggctcaagagaagcagttggaaaactgaagacccaggagagccaaaggtatagtatcagtcaaagttgaaagtcctgagaaccaagagagctgatggtataaattctggtttgaatccaatggcctgagaaccaggagagcctgtggtgtagaatttagtccaagtctgaaagcaaagaaaattgatatcccagcttaaagacaagcagagataaataatttttcttactgagccttcaattgattggatgaggcccattcacattgggaagggcaagctgctttattgagtttaccaattcaaatgtcaatctcatccagaaacatcctcacagacacaacacgaaataatgtttaagcaaatatcttcatatcccatgacccaatcaagctaacacataaaattaagcattatacttgtgtacacaaatagacatttttaacttagctgtgcatttctccaaatcctttagcaaattacaaataccaatcaagaatgctgacggaaacatacctacttgtgtgactacaagttaaaacactgataacaccaggtgttggtgaggatgtagagttgactggaactcctatagatcactggtatgagtgaacatgttacaatcactttggaaactggaagtttttgtgatagttaagtatacacttacctatgatccataaatcatattcctagatatttacccaagagcaatgagtatgtgtgtccataaaatgatttgtacatggatgttcttcatagcagctttcttcataatagccccaaactagaaacaaccatcaactggagaatgaacaaaaaaatgcatattcataattagcaataaaaatcactactgatacatgtaataacatagatttgtctcagaaacattatgttgaataaaagaagcaaggcagaaaagtggctaatttttgattatttatgtgaagttaataaacaagaaatctgtgatgatagaagtcagaatagtagttatcctatagaagagcaggattgctgatatagtttgactgtgtccccactcaaatctcatcttgaattcccacatgttgtgggagggacctggtgggaaataattgagtcatgagagcaggtctttcctgtgctgtcttcatgatagtgaataagtctcacaagatctgatggttttaaaaacaggagtttcccttcacaagttgtctttctttgcctgctgccatccatgtaagatgtgacttgctcctccttgccttccgccatgattgtgaggcctcttcagccatgtgaactgcaagtccattaaacctctttttcttcccagtcttgggtatgtctttattagcagtgtgaaaatggattaatacagtaaattggtactgggaatgggttgctgctgaaaagatacctgaaatgtggaagcgactttggaactgggtaacaggcagaggctagagcagtttcgagggctcagaagaaaacaggaaaatgtgggaaagtttggaacttcctagagacttgttgaatgctttgaccaaaatgctgacaatgacatggacaatgaaatctaggctgagatggtctcagatggagatgaggaacttgttgggaactggagcaaaggtgactcttgttatgttttagcaaagagactggcagcattttgcccttgccctggagatttgtggaactttgaacttgagagagatgattagggtatatatatctctatatatctggtggaagaaatttctaagcatcaaagcattcaagatgtgacttgggtgctgttaaaggcattcagttttaaaaaggaaaccaagcataaaagttcaaaaaattcacagcctgacaatgcaacagaaaagaaaatcccattttctgaggagaaattcaagccagctgcagaaaattgcataagtaatgaggagctgaatgttaatccccaagacaatgggaaaaatgtctccagggcatgtcagacaactttgtggcagcccctttcatcacagacatagaggcctaggaggaaaaaatggcatggtgggctgggcctaggttccctctgctgtgtgcactctagggacttagtaacctgcatcccagctgctccagctgtgactaaaaggggccaagatacagctcagaccatggcttcagaggatgcaagccccaagccttggcagcttccacatggtatagagcctgtgggtacacagaagtcaagaattgaggtttgggaacctcctcttagatttcaaaggatatatggaaatgcctggatgtccaggcagaagtttgctgcaggggtgaggcactcatgaagaatctctgctaaggcagtgcagaagggaaatttggggtgggcacccccacacagagtcctcactgaggtactgcctagtggaactgtgagaagagggccaccatcctccagaccccggaatggtagatccacagaccacttgcaccatgcacctggaaaatctacagacactcaacactagcccatgaaagcagctgagagggaggctgtaccctgtaaagccacaggggcagagctgtccaacaccatgggaactcaacccttgcatcagtgtgacctggatgtgagacatggagtcaaaggagatcgttttggagctttaacatttgactgtcctgctgtatttcagacttgctgactttttggacttgtagcccctttgttttggccaatttctcccatttggaatggctgtatttacccaatacttgtatctgcattgtatctaggaagtaactagcttgcttttgattttacaggctcataggttgaagggacttgccttgtctcagatgagactttggactgtggacttttgagttaatgctgaaatgagttaagactttgggagactgttggggaggcatgattggttttgaaacataaggacatgagatttgggaggagccagggtggaatgatatggtttggctgtgtccccacccaaatcttgagttcccacatgttgtgggagggactcagtgggaggaaattgaatcatgggagcaggtctttcctgtgctgttctcatgatagtgaataagcctcatgaaatccgatgattttaaagatgggagtttccctgcacaagctctctctcattacctgctgccatccatgtaagacatgacttgctcctccttgacttctgccatgattatgaggcttccttagccacatggtactgtaagtccattaaacctctttttcttcgcagtctcgggtatgtctttatcagtagcgtgaaaatgaactaatacaattcctgattggaaaactacacaggaaactttcgggatgatggaaatattttatattttgatccaggccctggtctcatgggtttatgtgtacatatatgcatacatatatgtaaagtataagtatacttatatacaccgaagtatataaatatgcattgtagacttgtgcatctcactgggcgtaaagtatgccttaataaagaactgtgaaaaatagcttcaatacaaaaaattatgctaaataatgaaatgaaaccaaatttaatattttcaacaatttggagacctaaaccaatacttgtgaatagacaactctctcccagatggcctaagctgagcaatttccataagtcaaacttatcaagctattgcttgagtttctggggttcagatcacacacaaaaaaagcccaaatcaaaactctgtttgaccctacataataactcacaaatccacttggattctggccagtatgccattctatttcagctgcagtgtcacaccttgcattgtagacatcatatcacctgatatttttgtatcatttgtaaataatttagcagcaacactgactaaaatttactataccacccaaaatacaaaacacaagagaatgacaagttaaaattattttattttaaaaaatagtctatatgcaaatagtcccaagtgtttaactgcatgatccttgtgggtctacacccctgattttaaatcctatgcttgctgtattctttcacagtttgccacagagtattttcttaatgcacaacagtaaaacaaattcaccaatgaaaatttattcttggctgggtgcagtggctcacacctgtaatcccagcactttgggaggccaaggcaggtggattacttgaggtcaggagtttgagaccagcctggtcaacatggtgaaaccccgtctctactgaaaaaacaaaaattagctgggtgtggtggtgggtgcctgtaataccagctactcaggaggctgaggcaggagaatcgcttgaaccccagaggcagaggttgcagtgagccaagattgcaccactgtgctccagcctgggtgacaagagtgaaactccatctcaaaaagaaaaaagaaaagaaaaaaggatttattctcaccaaaataagaacacaaggcaagtgataaatgtcacattaaattgtattaatattgcctaatttgtaatccacaacttcacaatataaaaaatatggattatttttaccaattccctctttttctactatgaatactttctatactcacatagaatagttcagtgaaatatacttggtacacctcagtgaaatactggctgattgattgacacaggtggttaatacaagaggcccttaagatgaagatgacattgatattatacaaacacgcagaatcacaaaatactctcagcctgtttgccaggaggcaaataggacacacaagtgggaagtttggtgtttctggaccacacagtctctgccacggcaaagaagatcagccagcctcctcaactcagtacaattcagacatggtcatgaggtaggggctatagtgagaaatgtgttagaacccacacctatatatgcacatatgcaacacaagctatgtgtttaagattccagaaactgtgtaagaaacaagatgttggaatgttgattggatttacatgttgatgaaatttcagtcaactaagcctagtatcatgcaagattactgtgaaaagtttaattgtaccaactgctcttgtttggaacaaagaactgtcagctctctttacattaaccatatttctctcccccattgctactgcaagaaccaaaaagagagtacttaaaactgggttctacctgcaaaatctgcaagtcagtcagtcatggtttacatgcatgtcaatttctacattatattttcctaaggcagacatttgacagatataaatcttgcctcagcaaggcccaaaggaaacatttgtcatacctccaatggtcattcttgattaaagaaatcacagcaaaacaaattggaattgcaaactcagcttatatcttttctctcacataatttctatatcttgaagccaacttctttaaccataaaatgtgcattctccacataggatacaagactatagctgtgaactattttcccaatgagttacatatgatgccttaatcgttaatagtaaatagatgtactatttgtatgaggtgaggtttttttctcatattttagaaagaatcatcattgtcttcttattgtgaattatcaaaggcaaataaaaaacagcctcttcagtacctagcatattttcattagaaacaaattctattgcgatgcaaattctttggacaaaagtgaagcactttgaagattttctaatatttttgtcaaaagaatacacatgtagatgtgtactttgccttttccataaatattcaaaatgtattctgaaattaaaataaaatatttctataaaataaacacattcacttggtgttttttctttcatttgcatttaaagcagtaatcacaatatcacaagattctttgagtaaaaggccttctcttgaaaaggtagataatagaaagaacatccagccccttgcccctagatggagggataaaaacagatagatgacaaacattctataaattaactctagccacaaaactactgcaaatcaaaacaaccacaaaacctccacaaaggttatgtgcatgccggagcacatgtgtctgggggtcatgaggcatccacatattacaataaattttccccacaacccttattgtaaggttgaactattagggaaaaatggagcagatgctctctaaataaatatgatgtctttatttaatttcctagatgccatgccctcactaattatttttgttctttatttgaagggaaatagataccttagaagaaaactccttttaaatgttttcataagctcaatcaaactaatcacatgttaaaagccagaaaagaaattaaaggagagcttaagctaatatgatgaattttagagaggcaaccaaggcaatttataccaaaagtcaacaaaatttacacaaactcaattgtgtatttttttagattatgcgcacattactatgaaaatatccaggcaaaatgtatgaactgttaaattgcaattgaatttggcaatctatacaactagttgtcattctaataattcatttaacattattgaaatcagtattttgtcccagcgtgttatcatgatattaactgaatttattcaaaaaggagacattatttttatctcaggctgattgctagcaccctcaacttcaattttgtttgatttactgtgcatattgtattattactaagacagatgctctgagacacataatccttattggtctatatatattggtgagctttctttggtaaaaaaaatctggctgggaaaaatatcttgtttgtggaattaagcaaaacattagcatttcaaatatttttgtcttttaaaacaccttgtgccacaactaactcaatagtgggaaaaagatctttgttcagaactgtatgtgtgtaaaagagagagagaattcaagaaacaggtgttatatatttcagaaactcatacttcgggaaagaatagaaacattatttgaacctttagcccaaagactatccaattgcacttagatgctatttctgttccaggttaatttcttagaaaccattgcaatcttattctagtttcctatttaattttatatatgttatttacttttgaacatgggctaaactcaaaaaattttagtcagtgaaggttacagtttagtcccatattacctacaatcttaccgtaagtatgcccacaaaatgtttgccttacgacagctctatgagtaagactatctttgagcttaaactcaatcgccttgggtgatactcaacaggtgtgtatcttttgttttcctttggcatggcccaattttacacagagattttggtagaatgacttgttcttctcatatctttttagcttcagaatccggataactcaattaaggaaataaaagtgggagaccttcaaaggagaacaagtaatttatgggacctgaatttctgaaataatattaaggcaacattgggcttcatggcaaaacaccagaggttgggaagagttgcagatttactcttttgacattcacatcacctccctccctccattttaatagatgcttttaccaactaatttggtctttctgatgctttgattaggcaagttacagatatattttaatagttgcaaaaatgaatacttcaaagaaagcatagaccaaggaaatatattgttgaaaagtaacccctcagcttagagaagaaaaaatacacaatgttattctactatctataaatgaggtactaactggatgatgtgtgattaccagtgtgattaaatggcaaaaacagacacatggagaagctaagtagtatgctgaggcattgtctttttgccaagttaatacactatgcacactgttttccatacaagattctcaagtagtaactatagtaaagagcgtaactcaaaaaatggagtgcctaggtggagaggcatactggaatgcatgaaggtgtttcattatgtatgatgagaacagtctccaccttctgaagagtcttcaaaaaagcaaactggaggaaaagtcacacctttaaggtgcaaatccaacaaagatgtcttaagattctgaggaagaatttgctccttgccagtcagttatttccagactgcagcatgtagatgataagatcaagatatgatcgaagagacttttacttgtgcaagaaggtagtaaccatgctactatttttaatccttaagatttaaaacatgcatttaattcttttaaagatgtacttaatgtatattctgatagcattccaaggcatttccattgaaaagtacatgctataaattcagtagtcttaacatacataatacaatatattatgttgttcgcacgaatgttcattgtagcacttttcacaatagcaaaaacatggaatcaacctaaatgtccatcagtgacagattggataaagaaaatgtggtacatatataccatggaatattatgcagtcgtaaaaaagaacaagattatgtccttttcagggacttggatggagctggaggccattatcctccgcaaactaacagaggaacagaaaacaaaataccacatgttctcacttataagtgagagctaaatgatgagaactcatggacacaaagagaacagacactggggcctgcttgaaggcagagggtgggaggagggaaaggagcagaaaaaaataactattgggtactaggcttagtacctgagtgatgaaataatcagtacaaaaaaaaccctgacaccagtttacctatataacaaatctgcacatgtacccccaaacctaaattaaaaggtaaaataatcatgttttttcaatttaataaaaagaccccccaaaaaatattgcccttcagttaacaaataaagtgtgatgcgaggcaagacatattagtttactgctaattcatagatgaagtctgatgatttactttctgcatctgaatctaacaattcttattgggagaaaaaaatgtgtacatatggttctttggtatgtttgttgagtattatttttgttgattatgtatcagccaacatattgtgaaaactgtcatgctttttaattatgtgtttttataattaaggtgaattattagaaaagcccaatgattaaaactctaattatgtaactgttattttcacaggaagcttattgagactcacctgagaactattccaagtcatgcattttctaatctgcccaatatttccagaatgtaagtttttttaatataaagaaaagtttgcatttgtgatatgttattctctaaacgtgttctatcaagaaaaatacttggtattatacttgcataaatcaatggcagttatattgtcaatgtatatgacaattttatgtacatgatttttatttcattttgctatatctctactccctaattcctacatgattttttaaaacctaaatcaaatttaaattcatttgattttgagcagttcataattctcgatgtattttaatatatcttgggatatggcaaaaccttagctgtaaatctctcctataaacatcccgtagtttataaagtaaacatatatacagatagacaaacatccatctgtcctagtcaccaagtcttgaatcacctttcactactaatacaaatatttacattttgttataaacgtagccagtggtttcagatctctcacgttaaaagagaattaaaaataattctaaaccttaaaaattgaattgctatccacttacagtaaggagaaaagggattttccatattgggttgacaaagagtgaatgaaatgaagcaggtctttatttcatttaattgattttgacaggcaatccagatagttcaggcatgcgaaataatataaccagaagcaacctgtacagtttttggccaaatgtactcactccgtggccattttgttagtgtttctgtcatttcagtagttctcaaccacagacgactctacccctagaagcatttagcatttttggttgctaaatgcccactagagagggggctgctactggcacctagtgggtaaaagtgaaggttgctgccgaacattctacagttcataggacagtccccacaacagaattatctagtccaaaatgtcagcagtgctgaggctgacagaccatcctactgaacatctctgcagttttttatgttgctaacaagtccttcctctttcaaattcttgcctctttgttttccttgatattgctctctcattcctcttcttgtctcacctggctactcttccttagtctccttttctgacttcctattttatttttgccagctacttaattaccagctctttctttgtatattttgttctaattcctctataccccactctccttgagtaaacactcccattccttgggctgcactatttcctaatacagctaatttccaaatattaccacttggatgtcccacaggctcttcaaaaccagcatatccaaaataaacacatcatcttcctcccaagctgttccttctcttttaacagcaccactgtagcatcctataagctaaaaaccttgaattctcctttagctcttccttttccctcatctaccttatacaactgcctatttggtgtctctgtttgcatgtcccaacagcttggccattacttcattcattcaacagatatttattgagccctactttgtgcctggcactttgctaggtgttccgtacacagcagtagacaaaactcacagcagttcagttttattcctaagagagtgatgagtatcatgatggggtcagttattgggtgatatggaaactcacataagaggtctattacctacacaggagcagggagaggagttggggaagacttcctgaaaaaaaaaatagcacctgacctgtgatctgcattatatagcaaagagcagaagggaaaagcctgggctttctgaagaattgaaatataataagtttcttgggggtagagcttaggcagggaggtgggcagtagaaaaaaataaaacttaggtctaagttagtacagggtcttgtaaatcatgtgaaggagtttaaaatcttccctaagggctgagccattcaatggttttaagcaggcaagagaaatggtcagattttcatttgagaaacattcccttggctatgtagtggagtgaggggtggaagtggagcaaggctgtaggcaggaagctagtgaagaggctgatgcagtgcccaaagtacaggggatggcaaattgaaggatgatcattgagtgggaataatgaaaaaggatagagatttgagacataaataagggagggctgatcaagtttctgattaggacatctgtgtggttgatcggcacattcatttaggcagagaagtgttttgtatatttgctgtggagggtcagggggtatgttaggaattcaatttggggcatatggcatttgaggtgcagttatattgagtacacatcaggacacagacagaattttttcattcatttgataaatatttgttcagcccctactatgtgccaatcactgctctgagagctggggatacatcagggaacaaacagacaaagatccatgtccccatggagtttccatttgaatgggaggaaatagacaatgaaccaaaaacacaataaataagtaaattagatactaatttagaaggaaataagtacatgggaaaaaaagtaaattagagtaaagaggattgggagttctgggtatatgggggcactcaggggagagattcaggtagagattgagagtcacaaacaactgggtgtaactgggaccaggaggaggcatccgcagagagggagaagctaaagagagtgaagaaagaacaattttaagagcatgtggtccctgaagaggcaggaggggatgagatccaaatagagggattggccttctagaggaagatggtcactttttacatcataacgaggaagtcatgttgtaggactttctccttagttcagctaaaagccaggttcttgtcacatggccataaaagattaggctcacagacactttgaagggtgacaaaaatagaatttattgggtgaaagaggaaaagagggaaacagggactctcagcaaagcgagagtcctcctagtccacttcccgcctcacagattgaatcccaggtaccaccccacaacaggagaggccaggctcctccccactataaatgaacttcccgaagctccaccccagtacacacttctcccagggcacaggcagttgaaggttctgctagggagcccttttttacttagctgtctcagttgtaggaaaagatgggacagatgcaggtaaactaataggcttattggtggggaattcaaggcattctcgtgttaaagtttcaaacatttctatgacttatcaaattattaaaggatatctaagaagatggaagatggaggtggcagagttagaaatttgatgagaagatttgaaataaaagtggtgagcaataagaagagggttggttgactgagatataggagacacccaggcagatctgaaggctccactgaggcttcccccagggagactgctggattctccagtctgggttaagtgataggggtccctgaaccctatcaagcatttaacaccttgtgttaatcccatttaccttgtacattaatctgtatctgtgagtactgtgagttccttgaaggtagggaacaggcctgttttgtcattgtccagaaggatgtctgtcatacaatgaatgttcaatacatatttgtggaataaaagcacatacacatacctgaataatgattaaagatttgatatatcttggggagaagaaagagatcagtaggatgatgctaggtttgtctgagatggttcaaattcccacttgggattctggcataattgttaatggcaccttgctttaactcacaaaactatcccagtttgaatgataagtcatatggtgactgtaatgattatatgatgtttaaatgcgaagaagaagtaggatctgatttttcctagttgtaaaaatggggtaagtaagcagggaatcacaatttttatccccctgaataaacgattcctgccagttgtcttcacaaccaagcaatcacagccatacaaaaagatgtcattaggttggagaaactggaacttccatttgataatatgggccgagtgactatccttctggaaccttgagaaagactcatacttcttaactgagaaattcagtagaagatttggagcaatggaaaagatgcttagggaaacaagttggcagccttgaaaaatgaatcttgctctgctagcttgctcagcttcatccatggtaaatccccacagtctctacacggtaaattaattcctttcaatctgttccattgtttcctttatgttagaaatatatttgtatcaaaacaatttatataacgttattatctgcaagaggcaaagggttaagagactgggtaaatcaaaggataattatttagagaacaggtaattcaaaatagaaagcacagagccattataatactcataataaccaagataaaaacttagaatggaacaatcagcactcctcttgtaaacattgcatcgatgaggatactttactggcagattcaattcaaactataggtcagtggttctcaacattgcctacacattagaattggctaagaagcttttgaaaaataaaagtacttgactcatccctcataaactctgatttaattatcctagaccgggtcttggacatctgtgtactttaaagcccttcaggtagtttaattgcatgtccagggttgagaatctctgctatggctatggctggaaaccatctgtcaattgttcattttcccaaatgtcatagaaatacctcacaatagaaagtggtcattgaatttggctgcattagtcattctcattacaagatggaatttgaggaaactatttgaaatattccttatatgttcttgacaagttgtatttaggaatttctctgttttcctttttcagtacttgaagcttttatttgaattactttttgcttacaaagtttaagacggagcttgaattttcagcttcatttaaaatcatgaagagaagtcttaagggagtatgtcgtcaacctgtggaatgttccactagagaattgcgattttctcttcatctttgaaactacatgtctaattccatgttattagacattccattaaaaatgcttcttattgactctagtgttcttttctgatgctcatgtttttttgctattttgaggaactcttctattcattcagttgtttaataagagtcgacaacatgccaagcactctgaaaggcactcaagattcagtggccaaaaacaggcacagttctgcatttcagagaacttacagtctagtgagacaacagaaatatcacccaaagaactggaaatttgcactctgataattagtgaaaggagtttatagttttatatatatatatatatatatagtgatatatcactatatataatccctatatatacaccatatatacatatgtatggcaggttcaattcaaactataggtcagtggttctcaacattgcctacacattagaatcagctaagaagcttttgaaaaataaaagtatttgactcatccttcataaactctgatttaattatcctagaccaggtcttggacatctgtgtattttaaaggaaatagaagagttcctttaaaatggaagagttcctcaaaatagcaaaaataaaataaaataaaataaaagcaagcatcagaaaagaacactagagtgaataagaagcatttttaatggaatgtctagtaacacggaattagacacgtagtttcaaagaagatgaagagaaaacctcaattctgtagtggaacattccacagggtgacactatatatatatatatatatatatatatcgctaaatatgcatatgggaaattttaatcagggagtttggggaaagtttctgaaggaagtgacagttaaatgataatttcagataaataggagttaatatacaggaggaattcaggtatcacaagatctgaaaaaaaaagtagtaagtaattttaacataatttggcagaatccatgagggttgtacatgttgcatgatctgggaagcgcataacaaaaagttatgtcaaaaatagtatgtttgaagtttacaaccttactaactttctactttgtcttatatttttctgacattcagctacgtatctatagatgtgactctgcagcagctggaatcacactccttctacaatttgagtaaagtgactcacatgtaagtacaaggaaaagtgcagcatagacctaagccacaaccactcttgactgataatcttggggctccagatggcaatgggagctggtttcttgattgtgagtcaaaacttctgtttatgattaaattattaacctgttctcattctcagttcatgttaattcatcttcattacacctcaattccatggttggaagttaaagacaacattaaaagttctgttcttgaaccactatctgttctattactactgtgtcagcatattttattgatgtgaatgtcagtgagacaataggtatttactgagtaactacttgattctatggtctgtgcaagattctacaaagctggcatattttccttaattcggaaagagaagagttgcttggtgagattagaatagtagggaatttaataaccctagttctggagttggtcagagttggatttgaacaccggcatctctgcctactcattatctacccttggacaagtcacataatctttcctagtctcatttgcaaaataagtgtaataagagctgcaacttcatgtttatcataaatatggaattatataatatctagcacctgaaaaccagtcaatataccattcaaaaatagaataatttttctatttcgctagtagattacaatctataaaaagtgttacataaataatcacattgcattattttaagtagctatgtattactaatcatgaactctattttcttgatgaagaaacaaaaatacttatctacaaatacttagtatatcctaacattacattaaacattgtatgaacattatttgtttggttattatttacctcttaaaacaaccctgtgaagtaaatacaattatttccattatttatataagaaaaacataaatgcagagagactaaatatgttttccttggtcgcacagttaccaagggacagggccacaatctttataccataaatgtatgacttaaaaattcttccctatccactacattaagatgctttcaagaatactgaggtccaagatattgcttacaagtatggtaggctaccttacatcagatcaactattggtctgagaataacttaaggagctgaatttttaaaaaaatgtttgaaagtattagagtgttatgaagacagtaagaactcaatgggcaataagcaaatcccaaaaacatcatttggttattttcccttgaggtatttcctgaattgtaagcaaaagcttaagggctaagaaactgaccagaggtttaggcatctattagggctaggaaaataaaactctgagttccgggcttgctaagaaggattgttcctagtaaacaatccaggattttggttgagatcactaaagagcttcatcctagaagtatgggaaaactgtgactagatcagcccttgcaaagactaaagcctagctttgaatcaataaaaaataactcgagtttgtggggcaaaaaaatcaagagaagaaaatagacaatagaaaatgatccataggaagttcaaatattggttatcagacacagactttaaaataactaacatgttcaaaaatttaaatggcaagagaaaatttcagaataaaactgaaaatgataagaaggatcagttgtaaactctagaatctaaaaagtcaataaaacatctaaatacatgagtttcacaagagattaggcatagctcaaaggagaattagtaatctggaagataggtcagaagactataatcagtctgaagcatggagagaaagagaaaataagaaatatatagcacaataaaaaatctagcatacctatgactagatcccaagaaaagagagaaagaatgagaaaagcaatatttgaaagcaactttccaaaactcttaagagacatcaagtcacgtatgttagaagtactgcaaaccccgaaaggataaatacgaagaaagctacatcgaggcacatcatagtaaaattgctaaaaaccaaagacgaaaagaaaattataaaagccagcaaggctgggcgcgctggctcatgcctgtaatcccagcattttagggggccaaggcaggcggatcacgaggttaggagattgagaccatccaggccaacatggtgaaaccttgtctctactaaaaacacaaaaatttgccgggcatggtggtgtgtccctgtaatcccagctactcgggaggctgaggcagggaatcacttgaacctgggcgggagaggttgcagtgagctgagattgtgccactacactccagcctgggcaacagagtaagattccatctcaaaaaaaaaaaaaaaaaaaaaaaaaagcagcaaggaaataataaataatactttcaaggatgtaacaagactgacagctgacttttcaacagaaatcatggaacttataaaacaacagaaagatatttgtgaacagcaaaacagcaaatatctgccaacccaaccaaaagattatttaaaattagaaaaagatagatacttcaagcaaacaaaaattgagagaatttattaccattaggctcatattaaaggaactactaatgggaattactaagacaaaaggaaagccatcccacatgctaagacatttctgtgcaggaagaaatgaaaagcaacagaaaaggtcaatatatgggtaaatataaatgaaccttgactgcacaaaatgaaataatgtcttaggggatttaaaatactgttctttgctctgcatgatagtgtgggatcataaaattgtgcagactgaaactgtattaagcagtcttaataatcaataagaaaaattgtgttgtgatttctaaaagcttttatgaaaacattaaaatttctcagtcagttataaatggaaagaaaaaataataaaactaatatttcacatactgtaattgtcaacattagaaatacttagaagtaaaatgctttattgctttgtaaaagcttagcaagagtagcttagacagtgcttgaccttttatctttattatataagttacaatagaatatcttttcaataccctggcaaattgtcatacttctttctaagtctagattagcttccatcattttatcctttgctttttaaatattataaaatattttcaagtgtttctttaatgtaaaatttttttaccgtcattgtttcttttgggacatcttcatcctttgcatccatttttctcccatcactaagttcctctgattaatatctagagtttctcagccagcctggacaacatagtgagatcttgtctctaccaaaaaaaaaattagctgagcatggtagtgcaaaccagtggtcccagctacatgggaggctgaggtgagaggattaattaagcccaggcattccaggctgcagtgagctatgatcacaccactgcattccagcttggatgacagagaaagagctggtctctaaaataaataaataaataaataaatagtctcagatggtggtggtatcaacattttcatgccagtgatttattctataactccatttacattttgtttgaatttccctttcagtaatattacatttcatttcttggcttcattttcatctttattggtaaattcactctttcaattagccatttttaggaaatgtcatatgaggtgattactgggaaacacataggaaacacaatgacatgctttattgtttgtgaatgaactgagcaagagatgcccagtgagcaaccatcaatgactttgaagagtgatgtagttggtcacctattataatgtgcatctgttatttacatagtgatttgtggactgaagagctagcaacaaagtttgtactttattcaatgattaatagttaatatactatggtaactgaaacttgagggatgtgttgaggacagttattatttacatttgattaaatcatggtaactgaacttcatgtgtattggagccattcaaagtagaactgcttgtatgcatagaattaaaatatgcagtagctttttaaaaaaagtataggacattataaataatgtgaaagtgttctaaaggtctttgaattatctgagaagtggtaaaagtactaactgaaattaaactttaataaatcataaataaatgttttaactcacagggcagctactaaaatgcttgtagaagactggataactaacaggctaatagtagtggggaatggaatgaaattaattaattaatacaaaaaagcgagaaattggaagaaatagagagtttctggaataaatagtagatttaactccaaataatcagcatttacattaactgcattaaatgtaaaaggactaaatactctaagtaaaatacaaagattgattgctgaatttttaatactcgctgtatgctgcttacaagagacattttaaacattatacagaaaggttgaaagtgaaaagctttgggaggccgaggcgggcggatcacgaggtcaggagatcgagaccatcccggctaaaacggtgaaaccccgtctctactaaaaatacaaaaaattagccgggcgtagtggcgggcgcctgtagtcccagctactcgggaggctgaggcaggagaatggcgtgaacccgggaggcggagcttgcagtgagccgagatcccgccactgcactccagcctgggcgacagagcgagactccgtctcaaaaaaaaaaaaaaataaaaaataaatatatatatatatatatatatatatataaaatgcacacagtaactaaaagaaaactgatgtaaatatgcatacatataaagcataaagtcttactctaagggacacttcataaagattaaaggaattactatataagatatagtgattctaaatttaatgtctataagagcatagcttcaaaccatataaagcagaaattggtagaactaaaaagataaacaataattggcaatcatactgagagcttattttaatatagttttatcaataattgatagaacaagcataccaaaatagtaaatatactgataaaaagttaataaaaagatttgaacataatttacaaacttgatcatattggcttataaaaaatattgtatccaacaactgcagagtatatattcttttcaaagacacatggaacatttactaaaattgaccacatgtggggccataaaagcaagtctcaatagattaccaaaaaaattaaaatcaccatgttctctaactagtaaataacctaacttctaaataactctgatttctaattaaccataggattaaggaagaaatcataataaacattagaaaataattttaactaaatgataataaaaatatgacatatcaaaacctgtgggatgtagtcaaagtcatacttagaagaaaacatatagccttaagacaacatatattagaaaagaaggttaaaaataaatcatttatgtatccttcataagaagtttatataatagagcagtacattaaaaccaaagaaagtaaaataacactgaggcccaggaaggctgaggatccagtacagtaaagacaacaacagtcttcaaaattgaaaaccaaatcttctgactccaaatctcatatccatttatcaaaccattttgcttctttgccccttcaccaaaaataaaagcaattaatttgtagtgaagtcctatataaaccccattgatcttaaaagcagtcattttgtttgtattatgatctttttcctcacaaagattccagttgttatttataagtttttttaagtaaacattcaattctctactctgagcaaaagtgttaacttcctaaaccgaaggaaactattaaatacagtaattaaaaagagaatgagtttaaaaataaattattaaaagataatttgcttatatacttgagatattgagagtctaatatcttaaagatttaaaggataatgcaccttgtattcttcaaatgtttctaatatgtatctgacattattgtctgcaaatggttttggtcagcagaaaagattagtgaagatttttgcatgcatgccacccaaatgtttaatacatttgttttataatcatttattaagcagcgactataatcaaagcattataacttgcatgagaaatatagagctgaaagatcactcatctttgctcaaggaattgagaatggttttgtgggtataaggcatgaaactgagtatcgatatagaatgatttgtttaatttatataccatataagtaccatcaaccaaacgttcctgggattcctcagtatagaattaaagccctctgatttgtttaggaaagagagctctttattgtgttggatttgctgcaaggatagatatgtagatactaaacttatgaatacacatttcaaatgccaatgcatattgccagcatttattgaaaagctccaatgaggactacagcagtaaaataacataatgttattccatttcataagtgtgttttctttctaagctgcccttcaaaactgactttttttggtcctgtgatttggtaaatagaaagatgagcagttagtttaccattgccacttctaattatccctgccagtacctgtccagtcttacagagctctatatacattctctgagatggcttcccaattcatgtttagattttgttctgtgatatgaattagagtattagaacataagcactctttagcctaaagctgcctccttgtaaatttggcctaaaggcctctctgtatgcagtgaactataacctaactggatatgtgaacagaccacagaccataatttacttttttaccaatcaccgagtttcagccagtcacaggcgaccaattgttcaaacagtgttcaaataaggcaaaagctaagctataaccaatctagctgcttctatacctcacttctgttttctgtatatcaccttgtttgcatccctcccagctccagaaattctctatcacacagcagcaccaaagtctctctgaacctattctggttagggggctgcccaattaatgaattattctttgctcaattaaactgttaaatttatgtaacattttcatcttaacagtactgacattgggtctgtgacctagaattgtcattcccaaaacaaaaagctattcattcaataaatacagtatgtttaacacagttaaacctgtgaccatggcatctttttttttcttttattattatactttaagttttagggtacatgtgcacattgtgcaggttagttacatatgtatacatgtgccatgctggtgtgctgcacccactaactcgtcatctagcattaggtatatctcccaatgctatccctcccccctccccccaccccacaatgtggagaaataggaacacttttacactgttggtgggactgtaaactagttcaaccattgtggaagtcagtgtggcgattcctcagggatctagaactagaaataccatttgacccagccatcccattactgagtatatacccaaaggactataaatcatgctgctataaagacacatgcacacgtatgtttattgtgacattattcacaatagcaaagacttggaaccaacccaaatgtccaacaatgatagactggattaagaaaatgtggcacatatacaccatgggatactatgcagccataaaaaatgatgagttcatgtcctttgtagggacatggatgaaattggaaatcatcattctcagtaaactatcgcaagaacaaaaaaccaaacaccgcatattctcactcataggtgggaattgaacaaggagatcacatggacacaggaaggggaacatcacactctgaagaccattgcatcttaaaaggctatatgcaagattcaaaatagtagatcattctgttcttattcatacctcttcccttggcctctgtgatatcacaatcctggttggactcctatcatgctggtcagtctttcctatcatcttttgctggctgcttccccttccccagctataattattgggctttcatatggcccaatcctgtgtagtcttctcttttcactctaacttctcctgctatgtgatcttatctaacaattcccaaatttatatatctagttcaggccctcattcttagtgttggtatatacctattggtctacttgacctctcttcccagacatcttacacatatctcacgttttatatccaaaactgacatcttgattgtcgtcctgaaatctactactcctgtgtatgttgagccaataaatgccaacttccttcatcctgatgcaaatcccaaatacctgagatgtatcactataccttctttcctcatcacccacttctactccttcaccatgtcctgttgattctactaccctaatatacagaaaatgtatcctcttcctctccactgccaccacccttatttaagccaccatcatctcttgtttgaactatgataattttatatcttaactggtattcccaattgatttcctctaattcagtatcttcacagcagccagaatgatttttcttgaataaaatccaagtatcttaacataaacagccaggcccacaagttcagctggttcctgcccacctctgcgttctcatcatgcttcactcctgcacacctgtgttctttggttttttgaacagtccaatatctttctcacctcagggtattcacatgcttttgcctctgcctagacatttatttctctctctctctctctttgcctagttaactctactgattattttttcagcctaattatgacctacacagagacacataccattcagcccacttctgcatctaagttagatccccatttgaatctatccttgaatgctttttggtttagaacttactaaaatttagtatgacaatgcagatgtttgataataataggtctctggaaggcaggatgctttgtgtgccattcacttacaccaagctgtgaggaaatcaaactaaaacaaaaaatgaaacaatgtattctgaacatgcattttaaaaataatggattggaagagtaggctagtctgaattcatgaaaaatctgattgacagaatgtttagtatatgtgtgtacacacacatattcatacatatatgtttagccaaccttaattgagcatttaccatatcccaagcactacactaattgctcaacacatatatactcatttaatcctcacgacaattctctaaagtagttactatcattttacagccaaagcaactgagattcaataactacatctttatatttaaaatgcatttcatgtaaacatcacagaattggatcttgcttttatatccagcctgaaaatctcagccttttagttggagtgtttaatccatgacatttattgtaattattgatatggttggatttcagtctaccattttcctatttgctttgtcttctctgttctttgttcctttatttctccttgtcttcttttggattaatctagttgtttttgcttttgtttattagtgttctattccattggctttttagtcctttgcaaattttttgtgattactcaagaaattatgacatgcatccttaacttatcacagtctacttagaaataatattatgttactccacatatcatgtaagaaccttttgaaattaaaattccatttaccttcttccatctttcatgctattgttgtcatatattttattcctatatatgttataaacctcataatacattattatgttaactttaaagattcaattaacttttacataatttgagtaaagaaaaaaatagtcatttatatacgttcaacatatttaatatttccagtgtccatgcccttctgtaggtccaattatttccctttagcccaaaaaacttttagtatttcactgtggttctactggcagcaaattttctgaggttttatttactgaaaatatattttaccttaatatttgaaaaacacttttgctgagtatagaattgtagcaaagccatttttgtttcagccttttgaaaatatccttcaatgtcttctggccttctttttttctgaggagtagtcgtatccgtgttattattctcctgtaagtaatgtgttttttcccctctggttacttgtaaaactttttctatatctttgcttttcaactgtttaatcataatatgcctaggtgagtttttttatatttaatctgcttaaggtttgccgaacttcgtggatttatgggttgctggttttgttaaatttggacatttttgtctactatttcaatagagtatgttagaagtgatacaatgccagttctagtcccagtctttaaaagaactggcagcttttactttatatccttggaaccctgaacaaccatgtaagacgtccaactgcactgatggagagaccgtgtgggaagatcctgagatcctgggatggagaaaagcctagctgagcctaaccttctagcaattcccatcaaaaagccaggcatgtaagcacacccttttggaccctccaaattgttccagacaccagctgaataacacccagtgatcctggtggaggctacagagagcagaaaatcacccagctcagcactgtctggcatcctgatccacaaaattgtgagctataataaaatgttattttaaccacttaatctggggtaatttgttatgcaacaataggtagccagaggaagtagcaattatatgtcagttaacaatgggtaaaggcattgaggatttgtaagaaaaaaatacaagaatggtaggttctctgtgagttattcaggatcctaagtggatacaaatcatttcccctgggtagtaacttcagcgaggatactgtttggaccgaaaagtatgcatgtaataaagatttatatctgcaaaatgatgaaacactggacacttccattttctattgtactttctctataagaaagtcaataacatacagattgctgctgttgttactcctaataataatagtgaccaagttctgaatgccttttgtgggccagcactccactaaaagtacttcacatacactatctcactagtttttaccaagcgttagtttctgctatgtcaaatgaagatggtaatacataccttgcagagctcttgccaaagttttcttagctaagacatttcaaagtgagaatttgaacccaaaagtgtctgcctccaaaaccactgcaatgccataaaatctctttaattaaaatatctgcaataattaaagaaaatgctggccaggcgtggtggcccacacctataatcccagcattttgggagactgaggcagaaggatggcttgagcccaggagtttgagaccagcctgggcggcagagtgagacatcatctctatgaaaaatattttttaaaattagctgggcacaatggcacttgcctatagtcccagcttctcaggaagttgaggcgggaggatcacttgagcctacaaggttgaggctgtagtgagtcatgatcgtgctacacactccagcctgggcaacagaatgagacccctagctcaaaagaaaaaaaaaaaaaaaagcaaagaaaaagaagtgctgccctcagaagaatgtttttacttttatgtgagtttttgggttttgtttgtttgtttgtttgtttgtttgtttttgagacggagtcttgctctgtcgcccaggctggagtgcagtggtgcaatctcagctcactgcaacctccgcctcctgggttcaagggattctcctgcctcagactcccaagtagctaggactacaggcgtgtgccaccatgcccagctaattttttgtatttttagtagagaaggggtttcaccatgttagccaggatggtctcaatctcttgacctcgtgatcctcctgcctcagcctcccaaagtcctgggattacaggtgtgagccaccgcacctggcctatgtgagttttttaaatcaaaaataagtgaaaaattttacaactgggataggtgaaatgtgtgacttatgccttatagtacaataagactatattttgctgatccactaagttgaatcaagtggatgcatcagaggtttcaaaatcaccagctttagcaccaatccttaaataatcatgaaagtagctgtatgcacctgccaggcaatttagagaatcacttctataatgttctatttttagtggaaaatctgctgataaatttaaattttcttcaatgtgctttaaaaatctgaatacttataaactctcctcaatatctcttatttttaatttctcaatacattaaaagatacatcaaatcatgaatattgccttttggttatagattatttctttcctccagttacatatggaatgttaataataattcattaataattatcaaagaattaagacttctctcattgaaaatcctcgataatgtaggaaataatttattctgtgaactttcatattatagattaatatgaaaagtaagtgctagtctaacagtcaaggctttagaaactaaggtctaatctataccaagagctttgacagacttttaacttttgacccagtaattccacttctataaattttccctaagaaaatagagtagtgaaaaaaagttaatgtaaaaagccatttgtttcggagttaattatttatattagagagaatttggaaaggacttaaatgcttagctaagagaatggtcaaatatgaaatactaagccaggcgcagaggcacgaacctttagtcacagctacttggagactgaggtgggaggattggttgaggtcagggatttgaggctgtagtgcactatgaccctgcctgtgaatagccactgcactccagcctgggcagcatagcatgaccctgacttataaagagaaaatctgttgctatagacaatttaatcacataagaaaagcttttgtcattatgttatttaaaatatatatgtatgtatgtatgtatatatatatacttaacagaacaaaatagtttttctctgtattatcaaatgatgagagtttttttttacatttaccagcttattataaaggatattacaaaagatagagatgaagattgcatagagtgaagtatgggggaggggcgcagagcttccgccccctcccttggcacaccaccctccaggaggatggtcagctgtcagaaagttcatttcctttttgtatgaatgtgtttcaaagttttttacaataaatatgtattacctctatagtcagatgaaattaactttttaaagatcactgtgcattaaacttgaaattaatacttgatgtcaagatacatcagtaatgtattatgtgatagaaccctgtcctaaaatgttaccttaaaattaatttacctatttattagtctcaggtttcacctagggattgtatagcacttaaaaaatttatagtaacaaaatgatggcttgggcaatatatacacatcttatttttaaaataaatagtaactatttccttataccacccagagtatgcagcaaagtgcacctaatagatgtccagtaattattcacttatattctaattaatctcttcccactctaaccacttgagtgagcaaacctagtcaaaatcaaggtgactgccttccatttttttgaactataggtgaggtgggaaattaaagaaaaataaaattaaaaagaaagagaaataagctttcctatattaagctgacttgtcccagaggcagcaacaggcacagcccagacccaggaaaagtcttgataatactatttaatgtgctctggagactctcccagcactccctcaacatagggagaagaaaaacaaattttcctttgttttatggaataagtttatagatacttgttctctgtcactagtgacttcaagtattctgttttatctaagaagtacaaagaaagtcataagaagcctgagtaggcctgaactacagctgcctgggcaccatagtgaaggttatgagataaaccagtgcaaggctctttagagcaaaacctagataatgaacatctaggttgcttggcaacggtcatgtgcaatcctgagtttgtcctgcctctgtatccctgctttcacaccactgtaaacttgcttcaagctagcccacccccttttgtgaaatgtgtataaaagtcaagtgctgtctttgttctaggcccagtctttggacattgagtctgctaagtccgagtgcactcaataataaagatatcgtcctgtatacaccccaaggtctctctctggtcctcctgatcccacaacacgggcatttaaaagtaaacgggaaaaaaattgaaaatcaaattgaaacaagagttaaaaagaagctggggactggtggagagctaggcttttggctaatattcttgttcaatttattgttttgggtaacaataaattggctgtggcagcttctcttctgacatcatctaactgagtcttcttggtttatgctggtctgaagtgttctcatccccatctaattttgcagatgaaatgcaaagtcggctttttgattgccctcaaattgtttcctggcttggcatgcttctcactcattaactggggcagtttagggtgtggggaaatatctccaagggtgagaagcacagtcaaatgccacgatccaatgcccgttgaataattgaggtaggaagggggacactaggaaaatggaaggaaattagtggttggaaaaaaaaaaagtcttccttaacagaagattttaagtgttttccccttcttctgttcctcattccctcgcctgagaactcccttctctcatcctgctgatttcccatatactctttgaggtgtggactcagggactgagtgcctgctgcaatgctagtcgtaacgggaaagccagatgtcctgtgctacgcttttattgagaattaatcaatgtttcttaggggaagaaaaaaaacccagaatgtagacatgtgattaagtgaacctaactgcatgctgaattattgatctgttgatttgtgaaaactgccattggacagcaatgttacacttttcatctaaatgtttatttcatttgaaatctaatgaaggagaattagacaatgaatatttacatatatttttagttctgctggatgatttccttgaaacctcatttaaaaaaaaaaaaaaggctgtatttgaagtcataagtcctagataaaggcccagtgttgctgctaagtgtataacaggagattattcacttgccctttcaaaacatgtctccatagttttgtctgcaaaatcaggatgatccttacctgcatcacacgagtcagttatgttgctccctcactaggaggaaattcacaccctccctcaggtgaaaaaaaagtacactgtttctttttaccctttaatcttctgtattaatttgtattcatgcttctgtgaagaaatacctgagactgggtaatttataaaggaaagaggtttcattgactcacggttctgcatggctggggaggcctcaggaaacttacaataatgacagaaggggaagcaaacaggttctttctcacatggcagcaggaaagagacatgcagagcaaagtggggtagatccccttataaaaccagcagatctcatgagaactcactcactatcacgagaacagcatgggggaagcaccctgtgatctaatcacctcccgcgaggtccctcccccaacacgtggggattacaatttggattacaattcaagatgagatttaggtccctctcccaacacatggagattacaactggggttacaattcaagatgagatttgggtggggacacagagccagaccatatcatcttccaaagctgaatttttctaatcaatacgctttaagagccttgcatatttccccaacaaagaaaaagagcctcgctccataaaacagcatacttaagcagcatatctggcacatattttaatgttattttttatagagaatatataaagctttacttttttgtttttaaagtttgagattttttgcatcctctttattacttttttttatttagataaaataaaaagtgaaaattccacattccttctttttaaacctatctgctagatgtgaccactatgaacagagtactctatatttttggaattttatttatgcttattagtttgggtaggtgaattactataagaaatagacaaaaatacagacatgtaacagcccttagtgagtgaggtttactgcttgctcatgggagagtactggatggatgagtgggagcacagagcagccaccttcaggcagtcactcagggcctcaggttgctggaggcacagccatcttcagctctggagggcatctccattcctagtgtgctgtattacaaacagcttttctttcttccaatgtctccagctttctggcagcatagctagcctcctgcacactcaggccataattgcttaactcaaaatggtgtgattcaaattcaccctcagaggcatgcttgaaggcattcaaatttgaacgcctctttcacccttctctgattagatgttcttttgtactcacttctgcccttcctttcttcctatctttgaataggttttactagttgcatttgcttcttatgttacctctctatttaatgattgattgattgattgagacagagtcttgctttttcgcccaggatggagtgcagtggcacaatctcagctcactgcaacctctgcctcctgcgttcaagcgattctcatgtcttggcctcccaaatagctggaattacagacataagccaccacacccggctaatttttgcatttttagtaaaaacagggtttcaccacgttgcccaggctggtcttgaactcctgacctcaactgatccacctgcctcggcctcccacctgtctcggcctcccaaagtgcttacaggcatgcgccaccacacccagctgttatctctcaccatttagctaaactactggcagtctacgaccactccaccccttctctgcttcaggagatacttttcaaaagtcacttgtgagcaagtggtaagctgttgccttacctcagaaagcagcttcttttccctgctgttttcttgtggggtctctcattcatctttctcctttgtagctcttacatttccttctagaaatcttctcctccttcatgtttccttctctctccttgctgcctctcccacatttctcctcttccagcctccatgtaagttgccagcctcatttaatcaactgttactagcagctgcatttcatttcccttttattctctaccttttcagctgacccaggtgggctgcattttctttcactctgacgttctcttagaccactcactcaggactactcgttcaacgacagtctcttgtggagcaattttccagactgcaaaccctgctcaatttccaaactcctgcatctagtttacatctgtttgtctctggcagtagttcaaaccctcctcccccaatggaaagctctggcaaggagtttattgctcaccctggaaagagagaaccacctcaacagagattgatagtctctagaggggcaaggtgggaaaattatgagattttggagtagggtggccaactgtcacactttgcccaagacagagggaattccaaggatatgggctttgcattttaaagccaggacaaaaaaatgaaagattgtataaagaggatctttccatgcagggtcttgtttaggtaaaaatcatgacataatagtttaggattagcatagtgaggatttggaagtgaggagttctaagatcttggggtataaactgttgatgctttctgttgaagcattgatggttctttgtttcaaaaactctctgtaatgaacaataaagcaatttgcctgggcaagagtctcctggaattgtagttatgttaatgaggacaatggaccagtaagggtatattattatagacagtaagctgtgtgtttagggaggagagaggtaggtgatttctgttctcagagttaactccatcctctcttttccaaggtctgtttcatattcagtgtccttagttgaaatgcctagttgaaaaaaccagagagttttttctaattttgcaagaatgtcacaacatctccagtcccaagtccctgatgtctcttctagctttcattgcacttatgaaaataacaataataaaagcattattttagagccctaactatgtggaggccaaacataaaatccctcatgaatattatttaatcctcacaaaagccccacaaaagaggtgttgttaattgttcctattttacagacaggaaaactatggctcaaagaggccaagaaacttgtccaaggtcatataatcagaagtggcagagccaagactctatttcgagtccatctgggctattcagaaataaaaaggagtgaactactaattcatgttacaacatggatgaacctcacagacattatgctaaatgaaagaaggcagacacaaaagactgcctgttatatgattccatttatatgaaatgtccagataaggcaaatttataaagaaagaaaactgatcagtggtttctaggcataaaggagcaagtggagactaactgcagatgggcctatggttacttttgtcattgacagaaatgttctaacctgtgatgatggtttcaaaatcatgtaatgttactaaaaatcattgaactgtatgcctacatacaatgtttgaagtttatggaatgtaaattctttttcaataaaactttaaaaattacagaggtcacattctaagctttctgactggtaccaccaatgactagatgctggttcttttaggtgccactcctaaggagaaatgctaaaggtttactgggttcttatatacttttcatgtaagcatagggaatgccttaaactcttttagccaatcaacctatgttgaatatgtttaatttaaccagtgagagttcatttctagcagttacttatttctctaatgctaactgtgcattcttgatcagcatttatataaacctaagtatgtaagttactgacacacgatattgcactatacatgcagaagtgtcttcgattgctgacatgacaaaataaacccaagtgaactgtgaagacttaccacttctgtacatctggtatggcaatgacagagccttactgtccatcttgctgtgctgtcgttcatcataaaattccctcatcctcccactccaacactcattgtcttggccagaatacttataaataataaagatatttgtcttcaactcctcaccaaatcattggagggatttttcttttttctctaaatgtaaaagaaaaaaaattctgatactacaattaagaacaatgtagcccataaattaaagtggacagaaaccaagccaacaatgcaaaagagctgagcagccattgggtccccgtgaggagacaggagtagtttgtcattgatgggacccctggcagctacagcccctggggtaccctgtggcgtaaatgcatatttttctcatgaacgtttgttaaaactgatttatgttgttttgtctttgataagaacagatacggatgcattatagtgactgtgttccttgtaacttatacagagaaattcggaataccaggaacttaacttacatagaccctgatgccctcaaagagctccccctcctaaagttcctgtaagtattaaatcctctcccatcctacttttctggggggagggggtcagatttaatgctgttgtctcccaggaatctccctagatgatgtggtccaggttcattttaatggtgtatagcctgggtcgggggcaaggtatcgggtgaaatgatccacatttttaaaacctattcaaaagtcagcacataatgctggaaccagagacctgctccaagaaacaggagggagaaaatgctatcatgtatatgtggtccttaaatgtagtatttcagaacaaaacaaaacaaaattctgagagccagttggtcaattttgtttgaaaatgggtatcacaacaatattattagagtggctgttacacaggaaaaaaaacccacaaagagtaaaatacacttccatggggagtggagggaaaacagaagggacaacagtttcaacctcccactccagcactcaaatgtccagcactcactgctttgctttgaaaacaccttatgagctaaccataagctccatgaatccagggaccacaacattttttttctctgttgaatctttactgcctagtacagagtaggcgctcagtacaaatgtgttcagtggatgtgtctgtatgacctcaggccccctggataccaggtggaagagtcctttttcctacttgcatgcattataaagattagaaaacaaagagtatgaagaagaaaattgttaaaaaaaacttaatcccaaaccccaaaataagcactattaacatttcagttcatcttcatccagaccttcaaaacaaacttatgttatcatagatattttatgagataagcccttaaggatgaatagagggtatcttgaacaagaatggggagatagaaaagaaatttagctggatggaatagcatgataaagacacaaatgtagggaaccacgcagcttctttggggaactaaaaatagttgcttttttttttttttttttgagatagagtcttgctctgttgccccaggctggagtgcagtggtgtgatcttggctcactgcaaccgccacttcctgcattcaagcgattctcctgcctcagcctcccgagtagctgggattacaggtgtgcaccaccatgcccagctaatttttgtatttttagtagagatggggtttcaccatgttggccaggctggtgtcgaactcctgacctcaggtgatccacccgcctcagcctcccaaagtgctgggactacaggcatgagccactgtgcctggccaatagttgtatattgaagaggtgggtgtgagagatgccaggggaatggaagacactgatgggatatgaagatgaaaggatgtctggaaagccatgaaagcttatgggacaagacaatcactcttcttatggactctgagtttcaaataatacaataaccctttgatgtgatgatcccccactatatgctctgtggggaacatacaggtttctaagacattgtccttgcctgtaatctagttgaggagatgtgtatgaaattgaaaagtgcctctcctacagaagaataatggaaagtgacgaaggagagacatatacagtgtttgggggttcaggtaattagagaagacatcagaaagaagacccacagcatggttttaagggacttgtttgagatttttgaagaatagaaagatcttgatccaagtatatggaccccacttgactcttggacctttttccctcctactgttcttcatgagcacctattgcaattgaactagttcgtttactgtatttcaaatataccttatggaatctcacctctctcctttgttatctggaatgtccctcccatttgctgattttgagacctctggctcctgctgcctcttcaaatcctatgccttcttctctagaaggagtcaagtctgaatttgcctcagaaggagtatcaatggatatagtttttctaccagaagaccttctctagagctttactgagtagtgtctagatctcactctatgctatgccaaattctcaaaaaaaaaaaaattctaattacattcaagtagctgcaacaaatgttaaaacaactaaatctgggaggcatcaggagcctgagaattcttgtattcatggtgttttatgcatgtcttttaatcttaacatttttctgtagatgatataaactacagaaggtaaagactttgtctttgattggtttccttccttttctggacactgtctttttttgagacagagtcgccctctgtcacccaggctggagtgcagtggcatgatctcggctcactgcaacctccacctcccaggttcaagtgattctcatgcctcagcctcccaagtagctgggattacaggcgcatgccaacacatgcagctaatttttgtatttttagtagagacagggtttcgccatgttaggctagtcttgaattcctggactcaagtgatccacctgccttggcctcccaaagtgttaggattataggcgtgagcccctgtgcccggctctctggacatatttttttaaatggtactgttataatggtactctcaggtcactgctgtaggaaagatattcttggcaaaataacagcataatatcatgtagagcttgaaagaggaagctggcttaaagtcatcatatcttcctgtcccatcttcttcttagcccttcactaacaaacacataattttttccaattaaacgagaaaatcacacacacacacacacgaaaactgaatttatatttctagtaaacccacttggttaaaacaatctccagagcattctaagccgagcagatgtattgacaccagtggactggattaaattattatgccttgagggaatatcatctcatccaaccatcagaacttgcccatagttactcagatatttagggaaggtgttgggagtttgactacaggttgtcttcagaacccatgctttcagctattacattattctccttcctatgtgttgatttttttacctaaattctatgcttttttttctctttttttcattaatttagtggcattttcaacactggacttaaaatgttccctgacctgaccaaagtttattccactgatatattctttatactgtaagtatgcacacatgccatgtttgacaatattttgtttgtcactgacaagaactagaatacagtcatgagggtaggttgaagataagtaaagcaattgtttcaaggagtaagcaatgatcaggtgtgactacactggcatgaagtaaggcaaggactgagaaataaccactggctttagcaatgtggtttgttggtgactctgccaagaacagttccagtggagtgctggttggagtgggctcaagagagacttgggtagacagaattagaaagagttaccataattaactcttttgagaggttttactattaaaaggagcagaaaatagctcagtaattgcaagatattgagtcaggagaaaagattttgtttgtgtgtttttgtttttaaatggaagaaattatgcaatgtttctttgccaatgggaatggttgaatagaaggaatatttgatgataactatgataccttatttttcatagagttttaatagttttttaaacactttcccacacatgacatttgctcctctcagccaccttataaggtgtaaaacaaagttactgcttttccatttatgaatgaggaaactgaggaatagaaacctcaagtgattttgtctgagcagtgtctcaaggaacagtcagaagtggtactcaaattactgcctgtgacctttgattggcacccatgtgccctttttcaaagctggtgacatgggtcagttgtcttactaattgtataggaatgaaaggacgtaaggcagagagaattacaagttgagtttgcattaaagagtcagcaaaatgtagaatgataagcttcaaactcttggggttttgctagaaaaaaaaattgatcatacttctttgttgcaaaagagctcagttcaaaatgtaagcaatcttccagaaactagaatggcgtagaaaggttctccaggagcctggcgaagtttggcaagtgaaggacattttagaaatactcattaaatgaaatcctttaatccttttatcctgaccttcttaaaggtccatgcatgtagaaaactctagttgttgtggacaaagtgttgcagattcgggagaagcctctcaaatccatctgcctaccccaagatgaggattaagtcagggacctccacccacacctaaagctctcacttaccccacatttgggctccaggtgcatgtcatctaggacagctctcaccacctcaccagacctctgagccactagcggttaagaagggtcagtgaaacttaaaaagaaataagattaagctatattgtgtcctgttatttaagtgcatatgcgcagcaagacccctgctgcagaaggaaagcattttttcattaagtgtttttgtccctctctcttgcagtgaaattacagacaacccttacatgacgtcaatccctgtgaatgcttttcagggactatgcaatgaaaccttgacactgtgagtattaccagttctactccctccatcaactaaattctattttgagccattttcatatgtttacagaccatccaagagccatactgccttatcatatatactctatagagtacaaagtgttttacacaattaaataatagtattgtcttatgggatggtactctgtagactacaaaacagtttaggtaacaagacaagaggattccattacggcagtggttggtacatttttcacgtgaagaaccagttaggcattacagaccatgcaacctctgtaggaactggtcaactctggcattgtgtggcaaaaaccgcagtactcaatatatacactaatgagcatgtctgtgttccaataaaactttatttatagaaagaggcagtggactagatttggcctgcaggccttatggaataatcatctgtatccaagtgtccccattctacagaagaagaactggggtttaagcaaattgaagtgacttacccaagatcactgagttaaaaaaaagtggtgccactaagaactttataaattctgcactcacacttttactcagtaatcacaaactgttattaagctcctgtaaggggatattacatagaaagcatagtgctgctataggtcagcatttttccagagcctgaatgggggcaaagccctttagatggtcaaaagtagatgcttaattagggatattcacaaaatgttctaaaggagaagatctaatagaggtataaaggataagttaattctccaagctggtagaaagttcctctctcattgtgtaagtcacaaagtagagttggagctacctctgcagggtctcctctctattttcaggaccactgcccaagttcaagcctggtgaagtttttgtctggattgtcaccccagtttcatttctctgctcacactaaagttggggtggaggtctttatcagatacaaacctgatcaaattactcaccagaaaaatggatccaagcttcatacagttcttctaaggggctattttctgagccattcctagtttatcagtttgggcccaatgaagttacctcaacttctgagagcaatggagcatttcagatgatccttctcatcacaacctggtgagcggtcccttgaaaagacaaaggaggctccttctcagtcataatttcttcttaccatgcagaaaaggcccaggctcttagcctgctcagctccaaacttcaaagccatttacttcctcagtaaagctttccattgcgccatatagtgctcatcataaggaaactcctacatgctaaacttctttatagaatattacctctaccccttgacaccatttctctaaaacccccatatctcaagcacccccctcaagtgaaagctcattgtcccacacctagcatagagcccagcatgtgtttctagaaacatctgagtgagggaagcccatatttcctaaaatatagaggagaggatggcatggattattcatgatcttttcagatgattatttctacattttggcaaaagtccttgcttcttcgaagctcaggctcaaaaaactatcaacttgaaaagacacatgttccaacaaccgactttgtacctgtattcctggtaggagaaagtttcagtcaaagtttgtaattcttttgtcttgcttcaccatgttcccttttcaaggccgatttgttcattaagaattctgtttaatatctgaaatgcaattcaaacaagtatttttaatgtccaggactctcaacaaatttaggaaaattaaaatgccatatgcacagttctcacatcttcataaaagagttctagtttagaaaaaatttacttatccacagagttttctcagccattgtgcttatattcctgggatattgcaatcctcacccaggacatgttagtagctggaattaaactcgctatgtaattatttaagatgaaacaaaaacaaacacatcaacaatgacaacaaagccacgagaatcttgctcagtttcccacaactatataggataaatccaagttttagaattctccttttatttatttatttttttaattttttttttttttttttttttttgagacagagtctcactctgtcacccagagctggagtgcaatggtgcgatctcggcttactgcaacctccgcctcccaggttcaagcaattctcctgcctcagcctcccgaatagctccttttaacatggtcacctaataagtgttcctcactttgttaaatatatagttatttgatcctctctgcaaccttttgattgggcattacatttatgtactaatttatcacatttttagagataaactgaggataagacaggttgagaaattctcaggatcatccagctattaagtggcagagccaggtctaattccaaatttgaactttcctgtgtgcttcttattgtgttcccaaggttcacatgtggtagattactgtggttttcaaggttcccttacaactgccactaggagttctcactagcagtgcctgagtgtggttatagctgtcttctcttatcttcatgccaataaccaccaataacctcttgcattcccatatagcccagaggtcccaaggctggggctccttctcctgcagaaaggggggctgcttttggtaggtggaaataattatatttgaggttggccaggcacagtggctcacgtctgtaatcccagcactttgggagaccgaggcaggcagatcacctgaagtcaagagtttgagaccagcctggccaacatggtgaaacccccatctctactgaaaaatacaaaaattagccagacctggtggcaggcgcctgtaatcccagctactcaggaggctgaggcaggagaattgcttgaacccgggagcagaggttgcagtaagcagagatcacgccactgcacttcagcctgggcaacagtgccagactccctgtcaaaaaaaaaaatcatatttgaagtcagggatcctaagtctcaacagtcctagaccaatgtgtttttggcaagtcaccctcatgtctcagtaacttcaataggaaatagaagtaataacatttcagactggctccctgaatcattaaatgaattaattagtcatagaaacacagcaacaagttaaaacattaacatttccagcccagtggttcacacctgtaatccccagtgtttcgggaggctgaggcaggcggatcacttgagcccagactagcctgggcaacatggtgaaacctcatctctacaacaaatacaaaaattagccaggcatggtggcacatgcctatagtcccaactgtttgagaggctgaggtgggaggatcgcttaagcccagggactcaaggctgcagtgagccgtgattgagccagtgtactccagcctgggtgacagagtgagagaccctgtctcaaaaaaaaaaaaaaaaaaatccataagaggacatggtctatctactttcttagattcatctatgaggtttaatttaattcagcccataacccttaaacatttaatctgtgataagctctgaggataaaaagatggataaaatacaaaggtgaaataacatttaaatattaatagaaaaataaaaacatacgcattcagatgaatgtctttcaaaatgtttatcttaagagactgcagctgctcctccactattgacattgggttaactattacctcaaatccctttttctgaatgtatgtggaatattcttttaaaatcttcaatggtaacaagtttgttactcaaagtaaatatgattctgagaaacaccttaaatttactaggagctaagtcaggagaatgggcattcaaactgagaaatattatcttgtttccaacaacttgtactggaaagttttcttgtgggatacatatgtgggacctgaaaaacctttatgtacatttatgacactgaagaaatatagtccaactctccagaaacaggccagcaccacttctcaccagtcactgatttctcttctctctgttggttgtaggaagctgtacaacaatggctttacttcagtccaaggatatgctttcaatgggacaaagctggatgctgtgtaagtcaagggtagccatgaaaactgtcactttcccttaccctaagaaccatccaatggggcagaatgctgttgagagataggttctaccagagcatcttccacgccagagttagtgtgaccaacatggaaatgaggtcaaggaacttggcaggggcccactttagtgggcgcttacgttagctccaatggtaagttccaaagcttttctccctggtgtgtgtgtgtgtgtgtgtgtgtgtgtgtaaatgttcatctattatgtacatgaagtaaaaggatatctttaatgaagcccaaagctgttcagaaaataaggtggtttctcttttagtcctttctgacatgtttttgggaaagatgtcagtttatatttgattcactcagaaatagctaaaaaatcatatccaacttttgccttttcaaaaaataaatagtgctgggaacagctgaaacagcaaacaatagactttgtgtttgatgtgttttataacactttttgagtatttctttacaaatgatatattttttctatttcacctttttctatttgttgtttttttcaaatttacctgctcatttttgctagtgtcttgttatgtattcatttttgtaattatattatttgtttcactttaaacatttcatacatagtaattttatgttccagaaatgatccctgcaaaatctgaaggccttatgacacaaaatctgttgcgtatggggcttctcaaaccttcctgggcatcagaccctctgagaggtcttatcaaaatacacagtctgattctgtagctctggatttggcctcgggattccatatttctaacaaactcccaggtgatgccgacactgctgttcatagaccacactttaagtagcaagggtgaggtcaataagctgtctaaccctatgcagtggctctggatggagaagaacactcatgtagattatgtgattttggttgatgttctggtttaggggttaggtggtaggttctggaacaattccatttttaaatggtaaatggtaaaaaggtgtttgaactcattacactgaggcaaggctccctgagttctgtttgaagtgaagtctcactctttgctggcttttgtgcttcataccagtctttatgaaatgaagagttacagtaccattctctcgattgtctggttgtggagtcataatggttcatttccattatttttttactacataattataggcaaagtctaaaaagactctatcgagtaaggtgatacttaccccctcaaatttatttacagaattggagagaccctccttccatcttaactttatgatactaacttcttacaatctttcatctacttttcaacatatttattagacacttgcaatgtaccaggccctgtgccattcactgggaaaacacagatgaacaggagccatgtgctccctgcccacactgagcgtacattctggtgggggtcagctcaagggcagcaacatcaaagggcaaagtacattagggagaagtgtacccaatccaaaatatgcatctcagatagaaaataactgaagcctaaatatcgaataacattgctttccttctttggagatacaagctagattttttctaggtttatcccattgttttttaaatcattattaaaattaatgttttagaaatgaattatcctatattccaggtttcaagttctttttctaatctagcattctggaaaggtggcatttgattttaatattgtatgaatttcaccaaatattttcctctttgattcaactattcctagaaagctatgactcttagggtaatgatcttcaaattcaaattttctatgaatggagtatggagagttcttaaaataatgaagatagtttgtaggtacttagggtataaagatttcagatgactatcacacagttctagacatagagtgcaccaaaagtttagttagcataaaggcaacaaagactcacattagcaggggcagggataggaggtagtaaggaaatcttcaaccagggaaaccaaagctgttaatatggctcctgaattcagtgtgttcacctgactcttgcctgaactagaactgcctttccagaatggtggattagagaaagaacctgaaacctgggatatagggtaattgatttctaaaacattaatttttccacaagcaaaagattttggagcccaagataagaatctatgcttcaaattaactgcctgtttttcctgccgtatttagtcattggaagatatgaccctcagacactatcaattatcatttattcaagatagagtataaaattcagaccttaaggtctacagagcaataattctcaacattagggagttttcaaagcactaatgcctaggttttgccgtcagacattctggatgtagcaggatcatggggatttaaaactctctccaagtgagtccaatacagagcaaaagtcaagaactactgctgtaaaatacattatcagtcttcttgtccaattgtcacgttttacatatgaagggaatgaagcccaacaagaacacatggctttttttttttaacgtggctgttttaatttgatagagcttcctagtggccaagtcaaagctgagacctgggtcccctggttcagaactctttccctgccctctgctgggattcatcatggctgacttaccagccatcaccaaggtgtgaacatccaactctggcaagtgcagcttgtttcttagccctgaagattgcttagacttcttagctcaatctattaaaggcgctaaacacagaagttaaaatatcttgatcctgaaaagaatgagatcatgtgagagaaagaaggcaactcaaaactcgaggcataatcaggagaagtttcagaggacaatcacatcaagaaacagtgttgttagtccacgagaacctgactttaccaatgctgcaaagccattcgtgagcttccagatgaagtctggtcggcgataacctgacaaaaatgctgggatgataaaacgttattcaagtcaaagaattggtattgaacttagtttacgtatattgactattttccctcaaaacatctcactcctcctcatgattggcctcctggtcatgtttagagaactctgcaaagacttcaagagattttcaaaagaggtcttcttcaatcaggaagtgttagtgtgctaagtggatctcagtgtaggtctagcagcttattatcttatgaccagccataaaattagacacagagtatcaaaggagtttagagacattttctattgaaaggatggaaaaacgaacaagtgaacaataatttctctttgagcttctcctcagcctttgtgataagagaagggatgggagagggggagctatgttcctttaaactatatttcttcaactctctttccatagtaaattaatgggtgttactttttaaaagaaatttatgatcttataaagttaaacaagatatataagtggacttttcagatcttctaataaaatcatctgaattattcatatcaaagagggggccttagtttgcagagcttctcaagcagttctcagttacaggagcatctctctggtctggtgttctacagacttttgaggggaataccgcctctgataggtaggaaaaaaatcaaggtgtttttctaccatcacacactcaatacaacagttttgacaccaaatgtttggaggcttttcccccacacaacaagtaatcaattctccaatgcacaccagctggatgtcctacaatttaactcagttctgatactctacctggagatagcatcagatccacaggttaagggctcagtcccacaagactgcctgctacttcagatgccagtcacagctcccaggttgtgtcctatgcttctgactgaccaattataaatcagggttcccccagtcccctcctcagttcagttaatttgctaaagcagctcacagaactcagggagacactttaaaggatattacaaaggagcagctgtgtggcaaagatgcatagggtgagaggtaggaaggagtgcagagcttccatgccctctctgggcacacaccctcccctcagctccacatgtgccttgaccaccttccagctacctggaagctcatccaaaccctctcctctctggctttgtatggaggtttcattacataggcttgatttattacatcactggccattggtgatcatctcaatcttttcagcccctgtctcctacctgaaggtgagaaggtggagctgaaagtccaaccctctaattatttattgatctttctggtgaccagccctcatcctgaagctatctagggattgacagtcaccagtcatctcatcagcatacaaaagacacttgtcactctggaaattccaagagttttaggagctgtgtgccaggaaacagataagaccaaatacatatttcacaatattacactactgaagaagaatctttcgatataccatctgcttgggaagcaggtaaatttaagaaggtttattcaagagatagctgtggagattctaagaactagtaaagatttcaaatgatcagatggccttctgaaattaaccctatggaaaaagtacgcaaagtcctcacttagcatcccagatagggtcttgaaaactacaacttgaaatacaaacaatgtataatgaaaccaattttaccataggctagttgatataaataggagttgagtttctatagcatatttctggtcacaaaaacaaccaaacttttgcataaggaccaaaatgcttctaatgttaaatatggaaacaaatatgagctatacatacatttaaggtaggttaataaaaacaagagaattatttgcccaattattccagttcaaggtcacaggtggccacagcctattccagaagctcagggcacaaggtgggagccaaccctgaacaggacgtcaccccaacatgggacacaatcacacataccaccacactcacttgaactggcaccatctagacacaccaagaaacctgatctgcacatctttggggtgtgggaggaaattggaatacctggagaaaacccacacagacatggggagtgtgtgcacacttcacataaacagtagccctggcctggaaaggattttattctcattaaaactaagcaggccgggtgtggtggctcatgtctgtaatcccagcactttgggaggctgaggcaggtggatcacaaagtcaggagatcgagaccatcctggctaacacggtgaaaccccgtctctactaaaaatacaaaaaaattagctgggcgtggtggcgggcgcctgtagtcccagctactcgggaggctgaggcaggagaatggtgtgaacccgggaggcggagcttgcagtgagccgagatcgcaccactgcactccagcctgggagactgagagagactccatctcagggaaaaaaaaaaaaaaaaactaaacaatagtgaatgagacaatattattagaggatctgctgtatatatagagactctccgtacgttcacaccagctttctcctcagaccatatcatggattctgtgggaggcttagctgacggcagagatattctgtcagtgacaatggattttcaattcactggtgccatgacttactgtctaactatcccttgaaacataggaaagaaatcagtgtactatttcacaatactttcttgacatttttatgttaagtattaaagttatttggaagagtttaacaaatgtggaaactatttctttgttaagaatcttttgtgtcttggtttctaaaagtctagatcaggggtcagcaaactttttctgggaaaagcccagatagcaaatatttggggccttatgggacatatggtcttagttgcactacttaagtctgcctttgtagtgtgaaagcagccatagacaatatataaacaaatgagcatggttatgttccaataaaactttatttacaaaaacaagggcaaggtaggatttgactggagggtcatagtttgtagacctctggataaaagtattcagtgaggatgaccattgtgtggcgaaatatgtactctgtttctctgaatttctggtaaaggttaaagggcaagcgtgggatcaagataaaaagtatctggattaaaatatttggcgttagaaagtacagatccaatcataatagaaaacaaatttttttaatcagtattttgaatccaagctggaaactgctcctgttataaaacaatgctccatcattctaccctaagtttctgactcctagtcaatagaaatttattctttcctagatttaagcacttcagtaaaaggtatcatgtaaatccagtgtaaaatcaaaatgatggttgtgataaggagccctgggactggaggaagacaaggattgagctataggtgaaggaaagaaaggtcaaggttccatggtaataataaaatagtattcacattgtgtttttaacatagggatgttgcttttggtgtcaatgctaattaagattttaaactaaggcaaacacatcaatctcctgtaattatcttaatagtgttcaaggatttcacatggcatgttagcaatttggtaatttctccagaagtttgtccaggtatcattaggttctcatttaaacaatgtgtcatccaaaagagcaatcatcccctatcattccacttcatgacaatttactgaaattagcagatcgacctcatttacactcattttttaaaatgtaactgaataatacaattacagccaagctggacaaattccacatcgagtgcaagtgctgatgcctcagcagcagtcaagcaattagttaggatttcatgaaaatgatggcagatgtgtaaaagcacattgtcctatgacttcctatggcgccaagaatgttgtcatcactcagaggtgaaattaataataatacaagcatcccttgctcaacagaagttgaactgtacttggtcacaagttaagtcacacattcattgtttggaatttcttttccatcctctttccacgcaatctgcgtggggatatgttgcttctcacagaatgtctgattctctgtatcacatttcctattgtcaaactctagtaactagctactatctgacagtaaacatttaggcaggaataaaaataccattttgatatgctaagagcccaccaatacactaattattatgaacagagtcaacagaattaatgtgctaattagcatcatgcattagctgattcgaagtaaaacaccacatcttggcacactgggaaaagacaatgatagagaatattataggattaagaaggctattatttatcatggggtaagtatttgaacagcttgtaggatatactctaaggctgacttttccctctgcctattgagagcttgagtattttctcacaggttactatttacaaacagctgtcctgatttctgctacaaaaggatttccatagagcaatccagcttctctttaaactaacatgagaggtaggcagggggtccctttaattttctgaattagcaacgctgtgggaggaaaacatggttccccacagaagtgttcccatgagagtctcacaacataatcaaggcccagcccaagttccccataaagggactgtggaggcacaggctgaaattccatcttggagctgcaatgtatcctaaaactccccagagagccaagttcagcagcaatagcaaattctcttgccacgacatcacactcctctctctggcatagatcacgtctttctaaacctggtatagagggtgcctctttctaggagtcacccaacaatcaggctttcattccttcctccagcaagtctttactgaatggccgctatgtgccacgagtgagtccaacagaaaagggcgtacataaacacacatatagtacacataatactgagtttgtcaatcgaatattttcctcagctcattcctcaccaccttcattttcctgactgcattggtcttccctaactgtgaactattcacaatcttaaatcagggcagggcttcttaactccatgtatggaaatctgacatctcttttctcagaagaacttcatttcttccaacaggttctcaaagaggaataagaccccaagcggtgaaaagctgttgaacacatagagatgtagccatgtctatcttatttttaaaggaaataccagttcttttctcataagccctttccagcatagatatttagaaaccctgactttcaaaaagtatttcctttcgtctcttactacaagccttttgagtctcttttaagctactttatgttcatcttctccttgcaagggatagtttttatcactcctctctaaaataatcattttctagagtaggttaaccagatagcctaccaagatttgtgactgatttatccaagctggttacaaatgtggatttcagaagaatcaaggtaagtcatggtcaaggaatcagtttaactagactgataatcccaggaaatgtcatgtgataaatgaggttgatggaagcactttcctggatatcaaggcttctgtatatgtatttcccctccccactgtcttgacttcagatggaaggcaagagcagcaagctgatgcaaggttgaaaagctaaatgaggcagccctcaaatctgctgaaggcagagtgatggtttcacttttaagcatctaattaactctaagaggtaaagtaccccaacagcagtgctggttttagagaacacagtctcctgaagtgtcagttcatctccgttcatcttggccagggctcctctgcatcctcctcctcccctcctggactctggctggcttttccagtctgaagtcttctgcagagtttctggtaaactgcaatgcttatcaaccaggctccttatcctcaggagtatattaaatatcagatgaaaacactgcagaattggacaagcaataatttagttttacaataatttctaatgattagaaagaacaagctgaatttcacttgcagcagttagagatgaagaggaaaaactgagatgagttcaccggctcttacttgattttcaacagcctgggaacagaatgtgatctgcaagctgcattgtccagagaatacaaaaagagatgcaagccagtgcagcccttgtactgaacttagttgtctttttacaaaatcatgctgttcaatatcttctctgcagttgtttttttttttcaaggtggattttgcccactctgggtgtcactgaccaaaggaattccatggacatagtgggttaaaggagagtcaaacaatgatcaagtggggattgtgattgaagccactgggaaggcacagattggctgctttagcatcttagccaggtctctgaatgcatttgagatttattgactctccctttgtcatacttaacaatgccctgaatactgggtgttctgccactaccagaagatgccaagtttgggctatacccttgaggtgtttgtaaaccagatgcctcaaaaatcactacctcaacaagaacagttggtcaaatgccaccacaccataagccaagtcttctattttttcactctttatgattttttctttaaagcaatcgtctgtgtcaccctaagagtttaacactgcccactttactgtcttgatgaaaaagtatgttgatttattttctactcattcacatattcatccaacaaatagttacagagatggtgaacttggcactgggtagacatagaactttcattctggctggggagacaaaaaataaagtaaacaaataaataaacaaggtaataattatggattgtgataatgctgtgaaagaaatagagagtgtatggaggcaaaatggtaatggctactttagattagctagttctcaatctctatttaagaagaaaattgggccggcacggtggctcatgcctgtaatcccagcactttgggaggccgagttgggcagatcagttgaggtcaggagctcgaaaccagcctggccaacatggtgaaaccctgtctctactaaaaatacaaaaattagtcaggcatgatggcgatcgcctgtagtcccagttactcaggaggctgaggcaggacaatcgcttgaacccaggaggttgcagtgagcagagatcgtgccactgcattccatactgggcgacagagtgagactccatctcaaaaaaaaaaaaaaaaagaagaagaagaaaattgaaagacccaaaaatatataccaatttatgacatgtcattttgtggagtctcagcacttactcgtcatttagtgattccctcatcctgcccagaaaggagagatttcttcagcactggtgattggtaaaactcttcttcctcccacggtttcaacgaagactcatgcctgggtccagttaaccaggagggaagtttctctgtgagggctctggagaagaaatccttccgactgaaggcttaatattattattaaccattacccttaaaaatgttccaccatgaagagcaaaccccgtaagtagaataatggaagcattagccatatctaagcagaccttctgagggtctctgctatattcttttgcatcaacaggtggccactcactaatgtttaagtggaccaggttatgttgtgagttattctaaatgtgtaaattgggagcatttgtaacaaggatatatatatgtgctatgcttctttttagataattttgttgtgtaataaagttatggggaaacagccagtttcaaaatccttggaagcttttatccatttggagggaattttatttcaaaatcactttgtaacttaaattgctccaaaaacattttaccctctaatgcccagtgtgtttttaaaatggaatggccaatgtgcccaccaaacctcttccatggaaggttgatgagattactctgtaatctcatctggctaaacactgctcacacacacactattgggttgtcagatcaaatacaggccacccaatacaatttgaatttcagatcaacaacagacaacttttaatataaatattttttaaattgcatggcaaatatttttactaaaaaattattcattgtttatctgaaactcaaatttaactggcatcttgtatttttatttgctaaatctgacaactttacccaaagaaaacatctgaatctctgacagtcctcagcatctctcaccaccctcaccatcttcattccattcctaatttaagcctagtcttcaaagttaaattggaatataaattaatactaacaaacaaaatttggtattacagaggattggcattaaagagaattaaaaaatacagttgccactggcctgaaaaatagggaattaaaacaacttttaagaaatttaggtatgcaaactagatcataaacatgctcattttcaaaaacttctgccataattaatgtgtaaaactttatacaattgaaacctagaatgttttaagtgctcaagccagaagaagataaagtatcttctaaattcttgaaatcagtcaatactatggtcacattttattctgatatttgtactaatttgatgtgatttcttaaaatcacctaattcattctctctctctctttctctctctccctctagttacctaaacaagaataaatacctgacagttattgacaaagatgcatttggaggagtatacagtggaccaagcttgctgtgagtaagacatacaaaagaatattttagtctttttttttctttttttttttttggaataaatggagacattaaggggagaatcttatgttcaagggtagaaaatgttgctgtctcgggtaaaggcttctgcaagtccctcttttcctggctgtataggctacctcttggaagaaagtccttgtcctttgagactcagaaggccccacgctccagtatgccatcatgatgcctgctaaggcagccaccttggtgtacatgctcacagaggctctgttcatggagcagctgctgtttgaaaaattttgaaatgcaagatccacaactagatggaaggcactctagtctttgcagaaaaaaatgtacctgaatgtacattgcacaatgcctggcacaaagaaggaagaatataaatgatagttcgactcgtctgtggaagaacttacaatcatggggaaagatggaataaaaacattttttaaacagcatgaaaacatacctatttgtgcatttcctttgatttacacccccacatccaatcagtgatcaggttctattgattctgcttccctgaagcctctgtatcattgccaccttcctcattcccttggttttgcctcagtttagaatctcatcattgagcatccactctagtccttgccaaagtggatcacaggccgggcacagtgtctcacacctgtaatcccagcactttgggaggccgaggcgggcagatcacgaggtcaggcgatcgagaccatcctggctaacatggtgaaaccctgtctccactaaaaatacaaaaaattagctgggcgtagtggcgggtgcctgtagtcccagctacttgggaggccgaggcaggagaatggcatgaacccaggaggaggagcttgcagcgagcccagatcgtgccactgcactccagcctggacgacagagcgagagtctgtctcaaaaaacaacaaaaacaaaaacaaaacaaaacaaaaaaacaaagtggaacacagcaccgtagagatacacaagataatctgttaggggcgagaggaaatattagaggttctatttatacttatttttaaataagaacaaattaagttttattaatcttttatttatagatagccactgtccctcaggtgtcaggtaggggtggatgcctcctagagaagggtgagtgatccacagtcctgagcactggataccttcactctttcacctttaacaatgttatttcactttcagactgaatgcacccagtgcatttaaggtcctgttctcttaacacatacgctccatccaaataagaggtcagagtgatcttgaaaatctgctgtgccacgtgggggttactgttaattcatggcaaagtacttaaaattattatgcatttttctttttacaagaagacaagtggggaaaaaatgtattaaccttttctgtgataaagtccctgtcagtaatttttaacctggaagatatttttcaataacacttttatatctgcttcttcaagattaaggtactacttcgccaagtaataagaaaagtcattgctttttcaaagaaatgtatgctttagagaaaggctttagaaacaggtatttggaaatattcacatattatgcgattttcctgataaaaaattgtcaatgccataaaaattctgtttggttcaaatcagaaatagaattttaacttgtttttaaatctttcaaattaagtttgttatgaactaaattgtatctgtcttcctaaattcaaatgctgaagccttaacctctagcatcttagtatgtgactgtatttgaagatagggtctgtaaagaggtaattaaattaaaataaggctgttaggtgagccctaatccaatctgacaggtggcctcataagacaaggagattgggatacacagagagacaccagggatgggcgctcacagaggaaaggccacgtgaggccacagcaagaaggtggccatctgcaagccagggagagaggcctcaggagaagccaaacttgctgacactttgatcttggacttgcagcctccagaactgtaagaaaatacatttctgttgtttaaatcagccaatctgtggtattttgttaccatagctctagcaaagtaatacagagttgtagcaggtttaaaatccatgtgtataaaatgtgaaaatgaaacacctccagatcaccttgcaaaaacaactgattgacatcagaaaatataaaatttcattaaaaacatgtatttaattactgaattagattgaaaaatgagaatcttagtttaataaatgcagttaagcctgctctattcttggtgaaacacccatctttggtaattttttcaactaggacggccatttaaaccaaaatcaaaataaactgaaccaaaagcagactttgaacagccatagccaaaagggttaaaaataattttcaaaactaattaagcatatttgataacattgcttttgcttttatgaaactttaaaaaatatatattacttatcttcattgcattattttaaaatgtatgtttagtgtgttatggtatatattatatagtattacaaaaatacatgtatagggttcatgactgttcatatgttagtggtacatactcagatattttttacttattaatatgtgagattgaaagaatttgaagaccaatagtgtagaccagaaccactcaaagtgagttcattacaaggtaagtggctgtccaggatatacagcaaagcacagcttcttttttggagaaaatcttgtcatgaaaataaagtcaaccaaactcaacagtgtgtttagttgaagtagctggcttacatccagcatacgcttcttatccttggaatggtaagaagctattggccaatgggcaccatacgttgagtagcagtagtctagatgattagcgtctccaaatctggctcctgcctttatttagtcttggttcctctcaaatccaccctccccaaacctctttgggttcacatgcaaatagaatcttaaacccaatactggcctcccattcccctcaggatagaggtcttggtgtggcttgcaaggcattgccataatcttcagctttgtcttttacactactttacgcctctgatcaatggtccatccatatcgaacctcttagctcccttaattctccaacctacttacactgttatgctaaactcttactcttcctactgtctggaaaaccctgctataatcttgtctttctgatgagcacctgctggcattttaattctgccttagagggcagaattgtatttccacaattctggttcatattataatgcccaaaacacagtatgagcttaataaatatttgtgaaattaatatggtacccaataaataattaaagcactcttctgtaaacattatagcacttaaagagcaatcatattttaaagatattttagtctgttgtcctcaagggaatgtgtccatttctacttctttggaagtggtcaattaaactacctgcttgtactgcctcgaagttgttttttatatttatggcaagattttctacaagactctcccaccaagttaagaggatttgtgaaactgcctgaaaatgctttccctgcctcttggtggcattccaggttgtggaaagtgacaaagatgaggagttatacctggagttgactcccagccccatcacttactaactgtaagacccaagtctcagttttctcatctgtcgaaacaggataaagtaagctaataaagtttaaataagataataaaggaactaaatatatcctcaataatgttagacattattatgattattttcacttcttcctgaactttgacacttcattattctgatctgttgtaacctctctgatcactccttccccatttctctccttagctcactgcatcattcctcaaaatggggttccatcctgggtcctggctctttttcctctatatcttctcctttggttaaatcatctgctcacaagtatcatgagaatgtgaatgatttctaagtttagggcctcataccttagctcttatttggccattcacccagctgaaattcttttcttgctccctctcattcctatccaatcccaacaatctggttaaactctccctagccagcctttgaaaatgtacaataagcatttactgatgagaacttgctaagcttgggattcttcactgggaactaccagtaggggagggtcactacattaaagaacagtgagtgaaaagcctcatcaagaaggtggcaattcagaaaatatctgaaagaaacaaagggacaagcctggggacaatctgaagaaagagcattttagacaagtgcaaagacccccaggtgagaatatacctggcacgtttgaggaatagcaaggaggccattgccgctcaaacagagtaaagtaaacgggggaaaaagtaaaagctgtgatcaaaaagatgatagggttgaggagcaacttgcagatggtcttagaggccatcatcaggtcttttgatttgctctttagatagaggggaagccataggagcattttgagcataggtgtgtcacagtctgactcaaagtttcacaggaacatgccggctgttgtgttgaaaataaactgtagggaaccaagtatggaagcaagaagaccacttaggaatatgccaaaataatataggcatgagatgaaagtagtttgcactaagacagcagcagtagagatgatgagaaataatctgatcctgactatattttttaaggtaaagccaacaggacatgctgatggatcggatatagcagatgatgagagaaacgaaggaatcaaggagaactgtaattatttttgactgagcagttaggagaatgagatcactatttcctgagataggggaagttagtttgaggtcccatgatgcatgcaggcaggcagtgatatatgtgggttcaaaagtcacaataggggtcagggctagagatatatttgagactctttggaatgtagctggtgatgaggggatacaggtatagaagaaatctcaaaaaatgaatagaattgagacttctgaactttccccaccaatgtgatttccctgatctttttttaaacaacattaaaatgacagtacttctgagaaaatataaatacattaaaaagcatgtatttttaatgacaaagagtaggaaaggtgatcatgtgagtaaatgatgaatgtcttcaaaaaccaagagagagctgcacgctaagtacttgcatgggtgaaatcaataaaatgcaagctaattcaaatcacaaaatctaggaaatattttatcaattaaatcttaagtgttctgcaaatgagaatataggtgacactgaagctggtcagtctcattctgcacagtcaagcactacttcttactcatcccagaaaaaagactagaattttctttctgttaaaatgtcatcaccaagactcaaggagaataagcacagttggggttagaaggcaggtactgttctgaaaacaggattatatgaaaatttacattctaaaatgtaagaataacaatcctcttatccactcactcaactcatagaatattggcaaaatgtataccttccaagtaagagatgagagtactgaggaagctgacaggcccaaggaaaagaaaaaaaaaaaaaacctacaaaaagtatcactgggggggaggagccaagatggccgaataggaacagctccggtctacagctcccagcgtcagcgacgcagaagacgggtgatttctgcatttccatctgaggtaccaggttcatctcactagggagtgccagacagtgggcacaggtcagtgggtgcgtgcactgtgcgcgagccaaagcagggcgaggcattgcctcactccagaagcgcaagcggtcagggagttccctttcctagtcaaagaaaggggtgacagacggcaactggaaaatcgggtcgctcccacccgaatactgcgcttttccgacgggcttaaaaaacggcgcaccacgagattatatcccgcacctggctcggagggtcctacgcccacggagtctccctgattgctagcacagcagtctgagatcaaactgcaaggcggcagcgaggctgggggaggggcgcccaccattgcacaggcgtgcttaggtaaacaaagcagcagggaagctcgaactgggtggagcccaccacagctcaaggaggcctgcctgcctctgtaggctccacctctgggggcagggcacagacaaacaaaaagacagcagtaacctccgcagacttaaatgtccctgtctgacagctttgaagagagccgtggttctaccagcacgcagctggagatctgagaacaggcagactgcctcctcaagtgggtccctgacccctgacccccgagcagcctaactgggaggcaccccccagcaggggcacactgacacctcacatggcagggtactccaacagacctgcagctgagggtcctgtctgttagaaggaaaactaacaaacagaaaggacatccacaccaaaaacccgtctgtacatcaccatcatcaaagaccaaaagtagataaaaccacaaagatggggaaaaaacagaacagaaaaactggaaactctaaaaagcagagtgcctctcctcctccaaaggaacgcagttcctcaccagcaacggaacaaagctggacggagaatgactttgacgagctgagagaagaaggcttcagacgatcaaattactctgagctacaggaggacattcaaaccaaaggcaaagaagttgaaaactttgaaaaaaatttagaagaatgtataacgagaataaccaatacagagaagtgcttaaaggagctgatggagctgaagaccaaggctcgagaactacatgaagaatgcagaagcctcaggagccgatgtgatcaactggaagaaagggtatcagcgatggaagatgaaatgaatgaaatgaagcgagaagggaagtttagagaaaaaagaatgaaaagaaatgagcaaagcctccaagaaatatgggactatgtgaaaagaccaaatctacatctgattggtgtacctgaaagtgatgtggagaatggaaccaagttggaaaacactctgcaggatattatccaggagaaattccccaatatagcaaggcaggccaacgttcagattcaggaaatacagagaatgccacaaagatactcctcgagaagagcaactccaagacacataattgtcagattcaccaaagttgaaatgaaggaaaaaatgtgaagggcagccagagagaaaggtcgggttaccctcaaagggaagcccatcagactaacagtggatctctcggcagaaaccctacaagccagaagagagtgggggccaatattcaacattcttcaagaaaagaattttcaacccagaatttcatatccagccaaactaagcttcataagtgaaggagaaataaaatgctttacagacaagcaaatgctgagagattttctcaccaccaggcctgccctaaaggagctcctgaaggaagcgctaaacatggaaaggaacaaccggtaccagccgctgcaaaatcatgccaaaatgtaaagaccatcgagactaggaagaaactgcatcaactgacgagcaaaataaccagctaacatcagaatgacaggatcaaattcacacataacaatattaactttaaatgtaaatggactaaatgctccaattaaaagacacagactggcaaattggataaagagtcaagacccatcagtgtgctgtattcaggaaacccatctcatgtgcagagacacacataggctcaaaataaaaggatggaggaagatctaccaagcaaatggaaaacaaaaaaaggcaggggttgcaatcctagtctctgataaaacagactttaaaccaacaaagatcaaaagagacaaagaaggccattacataatggtaaagggatcaattcaacaagaagagctaactatcctaaatatatatgcacccaatacaggagcacccagattcataaagcaagtcctgagtgacctacaaagagacttagactcccacacattaataatgggagactttaacaccccaatgtcaacattagacagatcaacgagacagaaagttaacaaggatacccaggaattgaactcagctctgcaccaagcggacctaatagacatctacagaactctccaccccaaatcaacagaatatacattttttttcagcaccacaccacacctattccaaaattgaccacatacttggaagtaaagttctcctcagcaaatgtaaaagaacacaaattataacaaactatctctcagaccacagtgcaatcaaactagaactcaggattaagaatctcactcaaaaccactcaactacatggaaactgaacaacctgctcctgaatgactactgggtacataacgaaatgaaggcagaaataaagatgttctttgaaaccaacaagaacaaagacacaacataccagaatctctgggacgcattcaaagcagtgtgtagagggaaatttatagcactaaatgcccacaagagaaagcaggaaagatccaaaattgacaccctaacatcacaattaaaagaactagaaaagcaagagcaaacacattcaaaagctagcagaaggcaagaaataactaaaatcagagcagaactgaaggaaatagagacacaaaaaacccttcaaaaaattaatgaatccaggagctggttttttgaaaggatcaacaaaatagatagaccactagcaagactactaaagaaaaaaagagagaagaatcaaatagacgcaataaaaaatgataaaggggatatcaccaccgatcccacagaaatacaaactaccatcagagaatactacaaacacctctacgcaaataaactagaaaatctagaagaaatggataaattcctcgacacatacactctcccaagactaaaccaggaagaagttgaatctctgaatagaccaataacaggagctgaaattgtggcaataatcaatagcttaccaaccaaagagtccagatggattcacagccgaattctaccagaggtacaaggaggaaatggtaccattccttctgaaactattccaatcaatagaaaaagagggaatcctccctaactcattttatgaggccagcatcattctgataccaaagccgggcagagacacaaccaaaaaagagaattttagaccaatatccttgatgaacattgatgcaaaaatcctcaataaaatactggcaaaatgaatccagcagcacatcaaaaagcttatccaccatgatcaagtgggcttcatccctgggatgcaaggctggttcaatatacgcaaatcaataaatgtaatccagcatataaacagagccaaagacaaaaaccacatgattatctcaatagatgcagaaaaggcctttgacaaaattcaacaacccttcatgctaaaaactctcaataaattaggtattgatgggacatatttcaaaataataagagctatctatgacaaacccacagccaatatcatactgaatgggcaaaaactggaagcattccctttgaaaactggcacaagacagggatgccctctctcaccactcctattcaacatagtgttggaagttctggccagggcaattagacaggagaaggaaataaagggtattcaattaggaaaagaggaagtcaaattgtccctgtttgcagacgacatgattgtatatctagaaaaccccattgtctcagcccaaaatctccttaagctgataagcaacttcagcaaagtctcaggatacaaaatcaatgtacaaaaatcacaagcattcttatacaccaacaacagacaaacagagagccaaatcatgagtgaactcccattcacaattgcttcaaagagaataaaatacctaggaatccaacttacaagggatgtgaaggacctcttcaaggagaactacaatccactgctcaaggaaataaaagaggatacaaacaaatggaagaacattccatgctcatgggtaggaagaatcaatattgtgaaaatggtcatactgcccaaggtaatttatagattcaatgccatccccatcaagctaccaatgactttcgtcacagaattggaaaaaaactacttaaaagttcatatggaaccaaaaaagagcccgcatcgccaagtgaatcctaagccaaaagaacaaagctggaggcatcacactacctgatttcaaactatactacaaggctacagtaagcaaaacagcatggtactggtaccaaaacagagatatagatcaatggaacagaacagagccctcagaaataatgccgcatgtctacaactatctgatctttgacaaacctgagaaaaacaagcaatggggaaaggattccctatttaataaatggtgctgggaaaactggctagccatatgtagaaagctgaaactggatcccttccttacaccttatacaaaaatcaattcaagatggattaaagacttaaacgttagacctaaaaccataaaaaccctagaagaaaacctaggcattaccattcaggacataggcatgggcaaggacttcatgtctaaaacaccaaaagcaatggcaacaaaagccaaaattgacaaatgggatctaattaaactaaagagcttctgcacagcaaaagaaactaccatcagagtgaacaggcaacctacaaaatgggagaaaatttttgcaacccactcatctgacaaagggctaatatccagaatctacaatgaactcaaacaaatttacaagaaaaaaacaaacaaccccatcaaaaagtgggcaaaggacatgaacagacacttctcaaaagaagacatttatgcagccaaaaaacacatgaaaaaatgttcatcatcactggccatcagagaaatgcaaatcaaaaccacattgagataccatctcacaccagttagaatggcaatcattaaaaagtcaggaaacaacaggtgctggagaggatgtggagaaataggaacacttttacattgttggtgggactgtaaactagttcaaccattgtggaagtcagtgtggcaattcctcagggatctagaactagaaataccatttgacccagccatcccattactgggtatatacccaaaggactataaatcatgctgctataaagacacgtgcacacgtatgtttattgcggcactattcacaatagcaaagacttggaaccaacccaaatgtccagcaaggatagactggattaagaaaatgtggtacatatacgccatggaattctatgcagccataaaaaatgatgagttcatgtcccttgtagggacatggatgaaattggaaatcatcattctcagtaaactatcgcaagaacaaaaaaccaaacaccgcatattctcactcataggtgggaattgaacaatgagatcacatggacacaggaaggggaacatcacactctggggactgttgtggggtggggggaggggggagggatagcattgggagatatacctaatgctagatgacgagttagtgggtgcagcgcaccagcatggcacatgtatacatatgtaactaacctgcacaatgtgcacatgtaccctaaaacttaaagtataataataaaaaaaataaaaaaataaaaaagaatcactgatagtctcccaaagtcaccatggtaatgcccaccagccaataagcttccacacacagagcttcccataggcctcccttacaaacaagaacagacatccaagaaccagcagaccttcgaggaaatccattgacatgaaaaacgtcaatgtcttagagttttcagtgtacagatctttcacctccttggtttaaatttattcctagtttttgttttgttttgatgccattataaatgggattgttttctttgtttctttttctgatagcttattgtttgtttatagaaacacaactgatttttgtaggttgactttgtatcctgtaactttactgaattcatttcttagttctaacaggtttttggtggaggctttctgattttctgtataagataatgtcatccgcactcagaaacagtttctcttctttctttaggatttggatgccgtttatttgtattgcctaattgttctaactaggacttccagtactatgttgaatagatgtggtgacatgaaaaacaaggactaaaataaacagaaaaaggaacttggaaggaacagaaacaatgcaagaaccagaagaaaactttcatgaaagttataacaaatatcctcagagagacaatgttttacatgtgcaaaacaattccttatacaggaatattcagaaaacaataaaagagcttttgaaaattaaaaacatgaaagccaaaaccaaaaaagtaagcagaagttgttaaagataaagggaaaaatggcactcagtagagacagcaaaaaaatatgaaatagaggaaagaaaaaacatgaacattagaaattcaagccacgaggtccacaacccaactaacaaaagttttaggaagagaaaacaaaaactgaaaaatagtgtagcagatttcccattaataaagaaaatgaattttcagaataaaaagacccacggagaacccatatggcaaaaaaaaagggtggggaggcatgaaggtacatcataaaacatgaaatcaatgggataaaaataataaattaaaggcgtctagacagagaaatcatgtggcctgtgcaggtgggagaatcggaatgccctcagccttctcaatggcgacattgaagaagaccatagatagaatacacctgttgaattctgaagggaaagtcatttccaaactaccaatcaagtatgattgataaaataaagatattttctcacatgcaaaatctcaaaaccttgatttcctgttcaccttttcttggagaataaaccaggaaaaagaaaaatgaggactttgttaaaacagtgatcaacacaggaaagaagcaaatagaatccccaggatgaccacaaagggaggtctgaggaatcttgggaacatgatgtctacatcagagctgaagaatgaagactccaagaggaaggtcttctagaaataaaagagggttggctgggcacggtgtatcatgcctgtaatcccagcactctggaagacagaagcaggcggatcacttgaggtcgggagtttgaggtcggcttagccaacatggtgaaactccatctctactaaaaatacaaaaattagccaggcatgttggtgcataattgtagtcccagctacttgggaggctgaggtaggagaatcgtttgaacccaggaggcggaggctgcaagtgagccgagattgcaccactgcactccagcctgggagacagagcaagactctgtctcaaaaaaataaaaggattgatagattatttgatggaattcattgtgtgaaaaactggtttgagatgtgttttcttttcctttttttttttttttttttttttttttttttttttttttttgagacgaagtcttgctctgtcacccaggctggagtgcaatggtgcgatctcagctcactgcaatctccacctcccgggttcaagcaattctcctgcctcagcctcccaagtagctgggattacaggtgccaacaccatacctggctaatttttgtatttttagtagagatggggtttcaccatgttggccaggctggtctcgaactcttgacctcaggcgatccacctgcctaggcctaccaaagttctgggattataggtgtgagccaccgctcctggccttgagaggtgttttaaagaacattggagcatgtagaaaacttagcaagaggtttgttcaaacaaagacacccaaataaaaagagagagacagatggacatcttatgaaaaaaaaaacaaacagttacatgacaaaggaaatgaaagcgcaatatgcaaagttgcaataaccacagtactgaatatgggtttaaccaaatatgtcacaaaactatttcaggagagtagaagagtgtgtcaggagaggaaatgtgtaggggtgagggatgataaaagaaagccaaatcctcatcttctatagtagagagttagcggataaaacctaaaaacaatacatcaagaaatacttacacttatggaaggaaataccagaagttaaaaggggttacttctgggacatcagacaccagactgcagggaagggctgcctcttgtattaacaagcttccagtataatttgctttttaaaaataggtccatgcattattttaataaaaattaggctgggcgtggtggctcaggcctgtaatcccagcactttgggaggctgaggcggtgtggatcacttgaggtcaggagttcaagaccagcctggcctacatggtgaaacgccgtctctactgaaaaatacaaaaattagctaggcgcggtggcaggcgcctgtaatcccagctactcgggaggttgaggcacgagaatcgcttgaacctgggaagcagaggttgcagtgagccgagattgcaccattgtactgtagcctgggagacagagcaagactccgtctaagaaaaaaaaaaaaattaacacttaatttaataacaaagccacaaagcataggaagagaagacaatggagatgtcagcatgtgagaggtcaataggagaaaagtaagaaatgaacaaagaagagtccagtctcattcctgaacttccaagcatagttgttgtctgaaaatgaatttgttaactaatcatacatagacatgtgatgtctctttaattcttgtcttgatcttttgtcaaaatctccattattttttcccacatagcttctttccataattagattttaagatcccagaggaaataagtggtgtcttatactttttataaccttcctgtatcaaaacagaagacagaaagtgctcaataaatattggatgaattgtaactaaatatcaaatagccatgatttcattgtcatttgttgtcaaagccaaacttcaaaaatcgtaaactccatctaaagaaaagagaatcagatgccatatatatttctgccttataaaggtttttgagggagaatacagtcacgtctaatagtctaaaaagtcaaacttacccacttaatcattgtttttcaaggtcacttctcaaaagataatctaatttaaagcaggtgcaatatctagagtcagaggatctattatccaatatttgctgtttttcaaaaagacttataaatttagtttggaagtataataaggttttttattgattgatttttaatcaagatatgcaatctcattttccatttttatactttccatttttgattaccttgttttctttttatcttattttgaaagagaagtgcttggtgttttaaatctcagaggaaagaacacactgaaatgcaatgcctttcataataatcagagttctctaaattctaaattatgtaacccactttaatatagcatttagcatattgttgagtaagtacctcctaagaagaggaaatctctgtaataatatccttgagttttcattacaggtatcagcataaataaacttcaaaaacacacttttcttgtttttagctgatcaaattaatacaagggtcatggcactgtcatatttctttggtttcttttttttcttttttttttaaactcttcatgatcttcacaagataatactattaggtggctgaaaatttgtggcagagtccttaccggcatgcctgaaagacacaggtgaatacacgattttctaggatgatcctgagcaaacatatattttaaatataatttgcatacaataacgtacacaattttttaagtgtacaggttgatgcaattcgacaaaactatattactctagcctgattaagacttggaacattttcattatccagaaagttccctcatgcctcaccccacctcccatagacatgctatttttctaatataaaaatttagtagtaaaattaacaggtaataggatagatttatatctctatatatatgtctttatgtatactttataggaaatactgctatactgttttccaaaagggttgtctcattttctattctcaccagcaaggtatgagcattttatactggccaatgcttttaattgtcatttttttttattctagccattctaatgggtctctcattgtggttttaatttgtgtttccctgattattaatgatgttgagcatctttttatgcacttgtcagctatttgtatattttcttttacccagtttctgttcaaattttttgcccattttcattggatttttgtttttttattattcaattgtgttccaggataaaatttttgacctaaataaaattttggtcctggccaccagctctctgccaaccctagtgcaaatggtccatttactcacttattccacagccattttactaagcacctactgagctccagtagttataaggataagacacagcctctgctttaaaaaggttacagtcaaatttaggagaaatgtgaataagtaactgtaacataagtttaatgtaaaaagccataggagatatttagagactgaacatgccatttctagttagggtgatcagcaaaagctttattaaaggagatagtatttgagatgggcttcaggtgaggagcagaattgcaacagacagtgatagagttatgagagaaaacaaaggcatgtctataggaaaacatgggatgtgttcagaggaaaaaaaattacataattcaggcaaaaggatagtgttgggatgttgtgttgaaatcatattatggacaacctaatctgacgcagcaggtaaagatggtccctgtggaagtagtagtaatagttgcataacagattaaagtttgtggccctcaactcgcctcagccctgactatattattgctgatacctctgtcacagccactgagctgggactgctaatctgcacctcctggcaatttgacagggactggatctccctctgaggggagggaaattgagccccaaatacctcatcagcctggagctccttgactttctttctgtgcttaccaagtgaagctcttggtgcagctcccttggagaagggaacctcctgcagatgcaaagccaggggaggcttgcatgctaggctgccctgctcaccgactgtgaaatgagttgcaaacacaagacaaactgccgtcttgcacacctagcttgggcaccaagccagacccatgccaaaggagccgagttgttggggaagcaactgaagtaggtcatccctcctaagtcacacgctcacatctccagaggcacagcaaagggtctgcaaggaagatcatgaaagaatttgaagagagagagagtaggcaatgatctttccagaatggtgtgcatgctgacttcttgacaagaacagggaatggtctgcttcagccctaggaattttcagaacagaagagtcacattgacaactcaggatacttggtttcccccaaaatcctaatttattgattggtagcatctcctactaccacagccactattatgagaaaaaagaattaatacattaaatcacagcaatctatattggcaaggttactttcataactattgagaaattatttgcagagcagtccccaactagtgggttgcctgctggtgggagagggataaagcagttagtgcaaagatcctcaaaatcatacaaacctttgtagctcttcaactgactaacagtgcaactactatcatccccgaaagatttttactttaaataaaagttctccaaaacaccaggagccactgtctagagcaatggcctcaaatggtcatgcattttatattaggggattcagtctgagtaaatgtttcctatctatgccaggccaaaaagtaaactagatagcttttcttctctaaaaataatttgcaaattcataaaatatttctttagcatggttttgctaaagttacttatttaagtaagggctttttaccttgacaaaaactggtagaacataaaagaatttttgctgagaatgaatactaggaaaacaacactgccaaaatgttctaaaccttgtaaattctgaaccattttattaactaattatccctctttagccaggagctcgtaacagtaaagaatctgaagtttgttctttgttgagcaagtaggacgataattacttcttcactgttccttctttgcaattttatgtataaataactctaccttttagtgagtgcccgctaggctctgtgctatttttacataaatttgatttcagccttccaaccccaaaagattctgacttctccacacactcttctcaattttgggtgattttgcccatttcaagtctcaattatctgtataatgaaagaagagaaacaagactgcataggaccaaatagtaaaggcaaaagccatgtatactatgttctgtagcaggttttacttgtgattttacaattaattggaggatgctggcaacaggctaaataatgacaggtataaatcaaccttggattaaatttttgaataaataacagaaacacaaaaagcagtttttagcatgtagaattaggcacacagttcttcccaagtaaatgtggatgggtactaaatgttttcacttttctgggagtttactcctagatcaggtgggaggaaataatcaagcattgtcatctgacacactatctctgccaggacatggaaatctattttgttaattacattctgcctctgagtctaaaagaaataaacacttaaaaaaaagtggaccttttatctcccacaagcagcattgagcctgacccttttgccagtatgatgatgatcattttgggtgtgtgtaggggttgtgaggttgagaagggaggggattcaacattgaggaggaggctatgcttgtgtttcagcttcagactattggcagttgatacggtttggctgtgtccccacccaaatctcatcttgaatttttgctcccacaattcccacatgttgtgggagggacccagtgggagataattgaatcatggaggtggttcttctatactgttctcatggtagtgaataagtctcacaaaatctgatcgttttataaggggttccccctttcacttggctctcattccctctcttgcctgccgccatgtaagacgtgccttttgccttttgccgtccaccatgattgtgaggtgggaggcaacgtggaactgtgagtccacattgggcaactgtgttccccagccacgtggaactgtgagtccattaaacctttttctttataaattacccagtctctggtatgtctttatcagcagtgtgaaaatggactaaaaattgccctggtttccttttgtcactgtgtggtagaatgctgactcaccaacttacaggatacggcaattttccattgcagaatccattatgttgcaatagtaaacgctgaaagatttcatagatcatggaaagtataggcttataagaaatgattgtagtaatatctgagttataaagcaattttatttgtacacatagactttaagaaaagattcataatttctgatcaattttctgaatagtcagacacgaattttcttgttaataataagtcatttttgagcattagctttgtgctgggttctttacagatagtctatcactttgggcctaactattcaatagaaagtattcttattcctatttaacaaataaggaaactggtgcagagatatcaggtaagtcccccgaggtcacctggccataagggaaatactaggatagaaattcagtattaactaactccaaaacacgatctcttcctggtacatcaggtcaaccccttttatgtaagattattcttgcacctgttgtaattctgcaactttacttgatcatcttcttaaatttctgcttaaaagcctccagtggtgctttaccatcttcatttttaaagagacaaagtcctcacaaatagccttcaaagacctgtgctgtttgtctcccacccatgccacgtattctctcatcctacctcctatttctttcctcctcatggttctaccccagccacactgaataggacacatggcatgttcccaccttaggggttgggcactagttgttttctctgccagagagccctctccccagatatccatagctgtctccttcgtctgatacaagtctttgcttaagggtaagtttctcattgagatcttccctgaatgccctatttaagtttgcaaactgcccaccactcttcatcccacttccctgttttatttttccccatgatgcttattaccatctgacattctagacatttgcctacagtggtaccccctttactcatggaggatatgctccgagacccacaggggatgactgaaacagaggatactccctaaccctatatataatatttttttcctccaacactgctcctgtcctaactttggttatttcaatatccacatggattatctttcctataccttgacctccgagctccactcccccaataagcctgcccttcattgtacttccaggcttcactagacctgtcatgaccaatgactacaaagcctccataaccttaatcttaaacatcctgctctctttctatctctttccttagaatacattaatccttcaattttttggttctgccaggatctacagtctgttactaacatttcactgtctctcacctccctcatatcctcactctttccttatgcagcttaaatgccatgttctgtcattataaacactgacttgtatacgcagccaactaactaccttgcctctctgtctcatcagcctcttctggccaagcccaaccttggttaggtctaaccacccacctgctgcaggcctgggcttttgcagctgaacatagcaagtgatttcaccttaaatcattcaccccaagcaggctctacctgctgcacagcaatcacatcccacttccccattccctctcccagtctgttggatgaccatgtcctatggcctcccctctcttcagttctctagtcctctccctcattctcatgtccacttgatcaccttgatttccatttcactgagcataaaatcaatccaaagagaactcctcatgtcccactaccacatctacccatcttcctgtgtctatgcccacatcctttctcctctcttccgtattttaagtcactttttaaggctggccccttcaccggggccctagatcccatcgcctctcaaaaactcaaggacattgcttcagcaatcctctcccttcttccctaatcatctgtattcccctccctactaagttatttcccatcagtgtataaacatgctgtagtttcttccatcttaaaacaatgtttcgtgaatatggattaaaagacacctaaaagacatcagttgaatgccatgtctgggtctatttggatctgacttaaacaaggtaagaactaccttgcctttcttggaaaactgatgattgaatattacacggccttaaagagttattgttttagatgttatttatttttaaaagattccttaattcttagaaaatattgaaatatttataattttaaaatatcccttccttcaaatctacttccacctactgccctatttatctgtgtctttttgcagcaactatcccaatttctgttatgctcactccaatcaggttttcacttcccaccatgccactaaaactccgtttaccaggtcaacagtgacttccacaattgctaaatcaagtggccaattagtacttatttcagaggcatttgactcagttgctgactccatcctccttggaatgtattcttcttttggcttccaaatcactactctctcttggtttttctccatacctctgattgttccttcctactctgtttttctagctcttcttcttcttcttcctgatctcttaatgttggagtgccccaggcctccatctttgatattctttttatctatatcttcattcacttccttggtgatcttatccacttgtatggatttacctaatgcctatgatacccaaatagaaatctccagtccagacaattctcccaaattccacgcttataaaacactgcttgggccgggcgcggtggctcacgcctgtaatcccagcactttgggaggccgaggcgggtggatcatgaggtcaggagatcgagaccatcctggctaacaaggtgaaaccccgtctctactaaaaatacaaaaaattagccgggcgcggtggcgggtgcctgtagtcccagctactcgggaggctgaggcaggagaatggcgtgaacccgggaagcggagcttgcagtgagccgagattgcgccactgcagtccgcagtccggcctgggcgacagagcgagactccgtctccaaaaaaaaaaaaaaaaaaaaacactgcttgactgccgtcaccatctggatgtctaataggcatctcaaacttgacatgcccaaaagtgaatttctgatcattccctccaaacctgcctcacctgcagccttccccatctcaggaaatggcaacttcattctcccagctgcagactagaaatcttggagtcattctcaacccttctctttctcacataccccatatcccatccatcagaaagtcccaatggctctacttttcaaatatctacaaactccaaccattttcagtatctccactgctaccaccctagtccaaagcaccatcctttctatttttgatctccctgtttccacgccttactcactttggtaactttcaaagcagcagccagcatgatcctttttaaataagtcagattataccattcctctgcagccttttgatctcacttccatgaaaatgtaatgttctttcgacagcctacaaggccacacatgatctggctcccaatacgtccgctgacttctcccacatgttctatgccctcaccgtctcagcaccagcaacactggcctccttgcttcctcaaatataccaggtgcactcctcacagtctttacactgctggtcctttggcctgcaatgcttttgctccagatatcagcttggctgtctccctcacctccttcagacacctcctcaactatctcctcaatgaggccttccctgacactgtcccctcatctctcattgtgacccactcctggtctctgccttttctcttccctgttccccttttccccatagtacttatcattatcatctaacatactgtatgtcttcacttttttaagaaaaaattacctttttctccactagaatgtaagcatgaggagagcaggaatttctgcctgtttagtttactattatagccctagcttctagaactatacttgagacatagacagcaatcaatacattctgtacttgctaaataaatgcatattgcatttctaaattatttaaacatattaatagacaagctcactgtcttgaatttataccttttaaacctttaacttatttttcaattcaatattaataaattaattacattgtattttaaacagtaaattaatctttctgctcttagatgcatttcatttaccaatttacagatgtaactgcgcatttataatggagcagcttccacatattgacctttgggaaaacctactttcatgacaagcaaacagaaaagacacttgcaattgctgttggaacactggcaagccaattagtgcttctttaatttgcaattgaatttatcataaattaatcttaaataataatcaatgacaaaatatctctcaaaaaataaaaatagttccaatgtttggggatactagagggcataattgcttttgaggttcaatttgctcttcctatgacattaaacgtagttagctcttttttttcctggcatcattaaaatctcatgatattcttctctgtatataatactgcaggactcactctctccaaattcaggtcctgttactttcattagacacttaactcgagattattcccacgacctaggcaattagacttcaaaccatctgccagactcagctcagctgcattctgatttgcgagtaaatacttgctagagacaaattctcatggagttcaatgcccattgcttgatgagctctttgaagagagtgccagagtcaacaaaacagagggaagccctccagcttgtagctttctatccatatggctacatccacaagtgatttcagaccccttcatcacccataacaactctttatattcttcttactcagaaaaaaaaaaaaatactacatgttgacaggtttattttaggaaagaaggtacacactatttaaaaatcctggatttgaagtaaccaaataaaactttgggtgagtgggaaaaaatacagcctcaaataacttaaaatgattcctgacttgttgagtttgaggatctcttcagactgagatttattctccgacaactccagaattgggagactatcaaatgtggctcagtactcaacaagtatttgttccaagctcttgcacagttctgtgtgctaaatacagtagtgattaaaagttaaagatgaagcattacacctaagattttattttctctccctcctgagatccccttaaaaagatgagaaaggagtttttcctatttatacatccacaagaatttttactatgcatacattcacagaagacaggtgagagcccatccatggtctgaagagctacagaattcagaatgaagaaaaatagaaaagaaggaaggcaaaactcacagtactcagagggagcgtagtcagagactgctgccttgctctgtaaaatctctgggaggaataggacttagaggtgatgggtatggcatgtggtaagagtaagacatgggactgaaaacagaagggttaactgaaagtttatatctggaagcattaatcctgtactctatttatgcaaaattccaacagccaagtacctccccactaagctgaagaggttgagaaatcctaaaacaaaaaagacattcacattctggcactttagggtctaccaacataatggccagctccctaaacaattaccctaaagcaaagtctgccaacagaaaagcaccctcttaaatacgaatgtgtgcaaccagagatctccagtcaaagaatgctcctaacatggaagatcaaaaccaagatacacaaatggcggggaaatgagcctggagaaatcaaagaaatcacagaaaagagaaaggaacctttaacaaagcaataattaaggacctgagataaatctgagaacacatttcatccctatcactataacaatcatgataataataataaaaataatagctaatatttattgagaacacactaagagctactgttcaacaaactcaagacaaggaaactgcagcacacaaagtttcagtgactgatagtaagcacagaagccagggtttaagtccagatagtgtgaatttaaaacccatgttcctaaacaaaggggtatgctttctcaaatatgctggttttatttcattttattttttattcttttttattttttatttttagaaggagtttcgctcttgttgcccaggctggagtgcaatggtgcaatctcggctcaccacgacctccacttcccgggttcaagcgattttctcctgcctcagcctcccgagtagctaggattacaggcatgtgccaccatgcccggctaattttgaatttttagtagatactggtttctccatgttggtcaggctggtctcaaactcccaacctcaggtgatccacccgcctcagcctcccaaagtgctgcgattacagatgtgagccaccgcacccaaccaaatacgctgtttttaaaaggaacagaacacaagaaagtgctcttaaaaaatctattcaggtatttaacaagtatgtgtttagagtcttctgttggctaaacaccagtctaggtaccaaaaatacggcaataaacagaacaggcagtatttcagctctcatgaagctaaaattaaaaatttagtagaagagatggaagatgcactcaaggaattttaccaggcaatttaataaaagtaataggagaaaattccaagaaaaaatggagatatgtctgatggaccaggaggtgccttttcctcttattaagaattccagagacaaaacagataaaatgagaataagttatcccataaacaatacaagaaaatttcctagcagtgaagaacaaaggtcttcagattgaaggggcctgtcttcccccagtgcccattataataaatggaaaaagattcctatcaaggtacaccttcatgaaatgtcacaccagggataaagagaaggtctgagaagcttccagaagtaataacaagtcaatgaccaaagaataagaatttgaatggggtcatacttaccaaaagcatcaatgggtgctagaatatgataaagcctttaaaattctgaagaaaggcgatttgcaaccttaaattttatagccagctaaagtaccaattgaatataagggtagaaaaaaataaggtcattttcagacatgcaaagactcagaaaatatctccttcacacagcctaagaaattacttgaaaatgtgctctaggagagaaaatcaagaaaaaagatgacacaagattcagaaagagactcccactggggagaggggaaatagtctcctaagaagcttgaacttcattctgtagatattaaaggaggcatggatttcaagctggaaagcaatataagatctgtgttttagaaaggacattctttcctaagtctttcctaatgtcctttagaaaaaacattctttcctaagttcctaaaatcagaatagtggaagatttctgagaccagtcacaaagtttttgcaaaactcaggtgaaatgtagttcagacctaaactaaggtggtagcaatgagaaccatgaaattgtagatgtgcaacagctgggctcacatctgattggggtggggggttcttagcacaatttcatgttgttgtaaatattcacggcatgaacgtagggcaagggcaagagagactccacaaggacatcgaagcttcaagccctggaaagtggtagatggaagacaagaaataaagacattccagtaagcttcaaggcaagaatcattctatttgagatattttgagtggagaggcagtgctagatccatagagaagtacagaggagctcctacctttctgtctgatagcaaccagactgtctgattaaaactgcagatcactgcaagggtggttaaatcaaaaaagaaaaaaggcagttgttccccctgcttgaccctgaaagtgcagagatagtgtgggtggactgcacaggaacacttaaggtgcagcatgcctaatggatacttagaacgatgacaagtgaggattaagatgtcttcaagtataatagattctaattttgtctgtaagtggccttagagctctgagatgagactacagaggtagtccagtgctagatctgcaagaccttaaagggcatggtaggaagcgtggatgttattcatggtacgttgagaagtcactgtaggcctttaggcaggaaagtgacattactcaattcatatgttatgattactctggctactatgtgaggaatggattgaaaaagaataaaagtggacaggaaagatatttcagtaagagataatgttagcttggactagaaagcttacactggagatgcaaatacgtggatttgagattcctttggagttcagaatcataggtgttttgcaagattaaatgtggatgggacaatggtcttgaggaaatccaacattcctcaaggttactaatttgagcaatcaagtggatgagagtgtcaattaccatgttggggggaaatagaggaggagcaggttgagctaagggcaaaggatgaaaagataagttttgaaaggccctattaagttggagacgcctgtgaggcatccaggtggagatatcaaataagcagttggatatacaagttgaggtctggactggagctgtatttgccaacttcattgcttttggcttcagctcagataaacttcaaattgggacaaggaggaaattaacaattattgagcacctaccatatgccaagcacccacatttcccaacatctactttctccttgcctgcccaagcaccctcccagttcagcccgagtgggacctaacttagaggccacctgggatatgtcattacatatactcagacaaactttggaatcttccctcccagattcctaatgagtccatggagacttactgcacctggatctgtgttcaaagactccaaagacctgaaagtgaagactagctcctgggacactgaagctgagaactccagacccaaatgatacttatgactccacccttggttcactgtatctttttggacacaacatcccttatttctttgtctgaattttagtatctgcccgcttcataaaaatgctttgagaattgaaaccagcttctgaatcacctggagagcatcttaaataatgcagattcccagcctccacaaacagagattataattcatttggtctggaatgtgtctcaatctgtattacaggtgattctgatgctggtccagagtgatccctggactagaaatgctgatttgcagagtgataaactgccagtttttccccaaattatctgcctcaatgctgtctccatcacttagaacattagggcagttttaaaagaaggcaccgaattctttgacactcttcccattaagaggtggactgtatgtcctctgcccttgaatttgatagttctcttagaatctggctgacataatgtgggaaggtcaagccacatggagtagccacagcaacagtcccagctgagctcagtctttgagtcacctcagccctggcaccagacatgccagtgaaggaaattgcagataatcccaacccccaggcattgagtcatcccagactccagatcttcccagctgacgccccagacatcacagaacagagacaacctatccccaccattccctgttcaaattaatgatccataaaacctatgctcataataaaaagattgttgctttatgccacttagttttggggtgttttgtcacgcagtaactgaaataattactaacatgttttctcaagaaatatgtattaaaatgcaaacacattacttggatgaactctttcagatgaacacacacaatcagtgtatctagcagacaacaaagcagggaaatgagccatgagatgctctcccgtttcactgacgtgaaagcatcactgggaaaggcaacctaagatgcttccagaaagctggaattgaaagatggccacaccttgaagacagcatggctaaaagagaaagacatgcctcaaaaaggacggatgaggccagagagcaaacccagattcattttcttcacaactgtgcttaagtctggctcaaaagtccctccactctctcactaaccgcaaaggtgtttatttatgccagtttataaatgtctaatgttaaaaatcacctgggaataatacaggaacaagcgccaagggtaatttttttttttttttttttttgagacagagtctcactttgtcacccaggctggagtacaatggcgtggtctcagctcactgcaacttccgcctcccaggttgaagtgattctcccgcctcagcctcctgagtagctgggactacaggcacgtgccaccatacccggctaatttttgtgtttttagtagagatggggtttcactatgttggccatgctggtcttgaactcctgacctcgtgatccgcccgcctcagcctaccaaagtgctgggattacaggcgtgagctaccgcacccagcagcaccaagggtaattcttaccagcagaccagtttggaaaatgctagattatatatttttttaattaaatacaaaacaaaatagcaactgcaccaaccctttcctcacaagagtaacagtcctgtggtgagaatggggttaatacatgagctttaagttctgacggccttgaaccttgagaatgtaaaccccagctaagtccaattacaacgatgtggggggaggaaatggaaaataatggaattcactagctaattggatactattaattatattaaatattttaaatggaattatcttctatgaggaatattttaattgacaaaatataaaataggagggatattaggttaaatattcatggccttattcaagctattaatggtgccaataaaaatgatggagcaagacatggaacctggactctctgggattcagaaaagagcagagaatgccacactaatgccacgaattcattctattttagtaactaacactgatgtctacatgttcccagcctgaccaccacccccctcaccccattgttctcagaagtgatttgaatctgatttcacattgttaatatcaacacttgagttttctttccaagaatcaatttacagtcttctaaagacactggagtggcgggggatggggggaaatgttgtcagtcatgaattcccaatgtaactggttatgactctgaggtctgcatcattatcagattttcatgatactgatgttgattcatatcagtgagcagtttatcagtccccaaactctagtccccacagcagctgatagcaaagtagtccccttcgtctctgttctacttcatttctcttgcctcttgagaccctttcatagtcacatggtggcatgttgcagagtaaaattgacatctctctctgattccaagagtttgcatgtattgtgatggatagaataaaatgactgtggaaatagcatttgtactactggatactggaattccaaggagttcctataacacaggcttagaagcctaatatccatccctccttagaccagaagctcagcttatgtactcagtagaagaaaggagcatatcatctcccaattaacctcaggcctgtttgagtttctggccaaggctgagaaggccctggctgctcactgcctctctgcatttttctgttctctgcctcccagggacgtgtctcaaaccagtgtcactgcccttccatccaaaggcctggagcacctgaaggaactgatagcaagaaacacctggactcttaagaaacttccactttccttgagtttccttcacctcacacgggctgacctttcttacccaagccactgctgtgcttttaagaatcagaagaaaatcagagggtaagtggcagggacccggcataagtgacaaaagaccttggtggaagtggaattcatttcttggttttggggaagatgcttcctggtttgaaaaccaggtggagaggaaattggaagcatccatatgaaacaggaaatccatgggacacagtgaccctgcggacccaaagtgggtgcagctgagaaataaggcaattgctgctggatagcggtagagcagaggaggtgacagatggcacaggagagagaaacacaaccagatctcatagaatcttgtagaggttatgtagatatgatgtccggtttccaggtacaattcagaattagatactgcaacacatattagaccccagacaccacaaccatgagaacagacttataaacaacacaaacagttgggttacctgattggtttgggccttgcaaatgtcatagctccctggttacatgcctgcaggctttggagtcagctgggtttataccgcagctctgccatttttcaagctgtgttatcccagcctagttacttaaccactctgagtctttgggaatggagatcctaatactaacattcatagcagttttgagaagattaaatgagaaactgaatggaaaacactggaatggaatggcctggaatattataagatcttcattaatattaactatgatatacagtatgtgcacatcaggctgcttatgagcctgcgaaggaggaattgccttcattttctctccaggctttctctgattcttttacttttttgcttttactctgcattatttcccccattgtgtcttgtacaatctcctgttctcctaatccaccttcatcatctctattcagtcctcctcagcttctatgtatttagtgattgacttactacacacataattgcagtcaggaaaatatcagatctaggtgtgagggcagaagctaaaacagccatacaaagaaggccaatatggtggccgggcacagtggctcacgcctgtaatcccagcactttgggaggctgagatggccagatcatctgaggtcaggagttcgagaccggccaggccaacatggtgaaaccccgtctgtactaaaaatacaaaaaacaaaattagccagatgtggtggtgggttcctgtaatcccagctactggagaggctgaggcagaagaattgcttgaacccggtaggcggaggttgcagtgagccgagatcgtgccagtgcactccagcctgggcaacaaagcaagattctgagattccatcacacacaggcacatgcacacacacacacaaagaaggccaatatgggcatcatagctgcaaaaagccaggagtggggtagaggatggtgatagtggactctacactgatgccatgcggcattgagaaggactggacaagggctgggtgggaggcttaagtggacctcaggggcagggtctagatttttccctagcctccagttgagaagagcaagtccattggacattttaagcagaacccaagagatcactcaaactctgctcagcagctgaggcaagttaaagaatcccttttgttgtgagtctggtgagcaaggaaaaaactaaatcttatttccacaagcatgcctgtatggtagtgtccatttgttcatttgttaaacagatatttactgagcaccttctatgtgcctggctgttgtaaatagaacagacaagaattccctcttgtattttgcttactgtctaatggaggaagtcagaaaataaacaggctggccgggggcagtggctcacttctgtaatcctagcactttgggaggcagaggtgggcggatcacttgaggtcaagagttcaagcccagcctggccaacatggtgaaaccctgtatctactaaaaatacataaatgttttatttttaaaatattcagtttgaaactaaataatgatgagtagaggcagccatgggtttttcaggcaatgggaacatagggttttagagctttgaataggaataataataacaataaccaccatatggcactcacaaagctgcaggtgctattgtaagagccttaaaaagataaattcattgaatcctttaataaccctatatgaaatagtcactcccattgtcccatgttacaaatgagttaaccaaacttcatgggcctacccaagctagtcaataattgagccaggttcccaccaaggcgactggctccagcatccacattttttttttaaacagagtctcactctgtcgccactcagcctggaatgcagtggcgcaatcttgactcactgcaacctccacctcccaggtttaagcgattctcctgcctcagcctcccaagtagctggaattacaggcacgtgccactacgcctggctaatttttggattttcagtagagatggggtttcaccatgttggccaggctggttcaagctcctgacctcaagtgatgtgcctgccttggcctcccaaagtgctgggattgagtcactacaggtgtgagccagcacacttggccacttttttttttttaatcactgttcttgaagtggttgcagaagagaaataagaccaatgccactggagcacagtaggggaggggaggtcataggaatgatgtcacagaaacaggcctgcctggatcctgtagaaccttatagaattatgtacatcatagtaagtagtttgcacattttcataaatgtgggaaccattcgtgggttttaaacaagcattcttttttttttttttttttttgagacagggtctcactctgtcatccaggctagagtatagtggcctgatctcgcctcactgcagctttgacctccccaggctcaggtgattttcccacctcagcctcccgagtagctacgaccataggcacataccaccatgcccagccaatgtttgcattttttatagagatgggatttcaccatgttgcccaggctggtctcaaactcctaggctcaagcaatccacctgccttggcctcccaaagtgctgggattacagtcatgagccactgcgcccagcctggcactgactcttttctgttgccttgcagaatccttgagtccttgatgtgtaatgagagcagtatgcagagcttgcgccagagaaaatctgtgaatgccttgaatagccccctccaccaggaatatgaagagaatctgggtgacagcattgttgggtacaaggaaaagtccaagttccaggatactcataacaacgctcattattacgtcttctttgaagaacaagaggatgagatcattggttttggccaggagctcaaaaacccccaggaagagactctacaagcttttgacagccattatgactacaccatatgtggggacagtgaagacatggtgtgtacccccaagtccgatgagttcaacccgtgtgaagacataatgggctacaagttcctgagaattgtggtgtggttcgttagtctgctggctctcctgggcaatgtctttgtcctgcttattctcctcaccagccactacaaactgaacgtcccccgctttctcatgtgcaacctggcctttgcggatttctgcatggggatgtacctgctcctcatcgcctctgtagacctctacactcactctgagtactacaaccatgccatcgactggcagacaggccctgggtgcaacacggctggtttcttcactgtctttgcaagcgagttatcggtgtatacgctgacggtcatcaccctggagcgctggtatgccatcaccttcgccatgcgcctggaccggaagatccgcctcaggcacgcatgtgccatcatggttgggggctgggtttgctgcttccttctcgccctgcttcctttggtgggaataagtagctatgccaaagtcagtatctgcctgcccatggacaccgagacccctcttgctctggcatatattgtttttgttctgacgctcaacatagttgccttcgtcatcgtctgctgctgttatgtgaagatctacatcacagtccgaaatccgcagtacaacccaggggacaaagataccaaaattgccaagaggatggctgtgttgatcttcaccgacttcatatgcatggccccaatctcattctatgctctgtcagcaattctgaacaagcctctcatcactgttagcaactccaaaatcttgctggtactcttctatccacttaactcctgtgccaatccattcctctatgctattttcaccaaggccttccagagggatgtgttcatcctactcagcaagtttggcatctgtaaacgccaggctcaggcataccgggggcagagggttcctccaaagaacagcactgatattcaggttcaaaaggttacccacgagatgaggcagggtctccacaacatggaagatgtctatgaactgattgaaaactcccatctaaccccaaagaagcaaggccaaatctcagaagagtatatgcaaacggttttgtaagttaacactacactactcacaatggtaggggaacttacaaaataatagtttcttgaatatgcattccaatcccatgacacccccaacacatagctgccctcactcttgtgcaggcgatgtttcaatgtttcatggggcaagagtttatctctggagagtgattagtattaacctaatcattgcccccaagaaggaagttaggctaccagcatatttgaatgccaggtgaaatcaaaataatctacactatctagaagactttcttgatgccaagtccagagatgtcattgtgtaggatgttcagtaaatattaactgagctatgtcaatatagagcttctcagttttgtataacatttcatactaaagattcagcaaatggaaaatgctattaatttggttggtgaccacaagataaaatcagtcccacgttggctcagttcaactagatgttccctgatacaaagagaacttgatttccttaaaactgaaaagccaaacacagctagctgtcatacaagaaacagctattatgagacatgaaggagggtaagaattagctttaagttttgttttgctttgttttgttttttaactcaacctattaatcatctcttcacaagaatccacctgatgtgaccaagctattatgtgttgcctggaaaaactggcaagatttcagcttatgtggcctagcaaactaagaattgctcttcttggccagcctcatagcataaaagatgtgaactctaggaagtctttctgagtagcaataagtgggaattatgggcagagcacactcaatcccctgttgattaataaaacaggctggacactaattaactatgggacttaaatctgtagaaatgaaggagtccaatagcttcttccaattttaaaactctagtacatccctttccctcaaatatatatttctaagataaagagaaagaagagcactaagtaagtagaatctgtttttcctattttgtagggctgctgactcctagtccttgaagcctagacacatgacccaggaaatttttcctttgtttcacttttgattatgatgtctgagccaaaaattcaattaagtaaacatactcgcctggatctgaatcattcatttaattactagatctacccagctgttatatcaggccaaaaacagattcgtgtttatataaaagagtaaacgatggttgcaaattttggctatttagagttgctacttcactatgaagagtcacttcaaaacacttcgcttgtctttagggatgatttttgccatttccagtccacggtatgatactaaagctgtcaagagaggtttcttcttttctgaaactgccagctctttccagccctgttgatcactggacataaagcttcttttccccaataattcttctttacttaaaatagtcaggatctttatctacagatgtactctccaggttacctgtgatgatagccccctaatgtcctgctagaaaagtctccaagcagagatgacattacttctgaatgctcataaaccacaccatgaaataaaagctctttgttgttttaagattgtgaagtgtcgttaatgggtccccacagatggtccctgctggactcacctggaatctctccacagccatacccactcatcactatcattgagacctgcacatcttaatagaaatattataaacatcgaaaatcatgacttacctagaagttcgcttgtaactaatgaaattaaacaaatgtgttgccttttgtcatgtgtttctctcctgtgacatttcaaaatatcacatcttgataaataatgtgtttcatcttgaatagctgaactaattgctttggaaacagagtcctagaaaagtgacttcaacagaattgttactaaaatttgcactcacaacatgaaataaattttcttcctatggaataatcgtg

SEQ ID NO: 82 - DNA, 139517 bp, Mus musculus strain C57BL/6J
tgcacccgggtctcttccagcgtcagacgcagggcactgagaatgtggcgacagcgcgcaacgatgaagtagcccagagggtcccttggaaaatgaggccagggtccctgctgctgcttgttctgctgctcgccctgtccaggagcctgcggggcaaagagtgtgcgtctccaccctgtgagtgtcaccaggaggacgacttcagagtcacctgcaaggagctccaccgaatccccagcctgccgcccagcacccagactctgtgagtagccaaggccaagaccccccccccccgagaaattcgtggtgtgtgttggggtgtgcgcggatatctggtcagtccctgtacaaattcaatcccccatgctcgggaaggtcagctatgctgctgacacgggggacagaatccctaataaaactttggttcaagatacctgggagttgtgcttaataaaaagttacaagtagtctgtctacattgtgccaactcctagtgcccgctggattctagtttcacatcaagtaatagttagacacacacacaaccttaagaattaacttttaaaacttatcttagaaaatacaattgcttctcttcccaaattcccctgtaagtatccctagatgagaaattaccttggccatttgacttatcaaataattgttaaaagcttgatcagagacggcatagtggctctcgactttaatcccagcagtcaagagactttctgtgaatttctgtgagttccagtccagcttggtcagcatagtgagttccaaggtagccagggctatgtagacagactctgtctataagaaggaaacaaaacaaaacaaaacaaaacataatcgggagcctattagaaatgaatccttggacttgtcagaaccaagaagggtttcaaaaaagggggagggttcccctcccattccatctgatctctcctttattctgaactagtctcctgaatgtgtgtgtcccaaaggggtttaactagattgcttacaggagcatacatgagggggttataggagcctgagcagttaccagtggtgaaaccacataaagaaaatgtctctccctcccaaggaaccaaggaaacatcaacatctgttaaatcttcaggtaggggtgggggccttctgagcccttacccactttatggcagtatgctaaagggtttaaacgtactcaggtcatgggcaggcaatcacagcttctattggctcacagccatgtcatgtcaagacagtgttctgccatctccaccccatcctcatttagagtttttgaagagacctctggtttataacgcaaatccttgagttagcctcactttgcagcatccatcaggatgctaaacatcctgggctggctgtttgatatgttgctaacatgctgagggtgtttcttccttagcatgatctacctgtgtactatggtagtgagagtgaagtcgatctcctctctctacactgccgatacaatgcttctgtggtcttatggatgggaaggagagacagttccaatgcagcactggatcttttcttacttgcctctccagggaggcacagggaccgtcattatagcaggggctgtgatggggactgggggagctgctatccctactgcccatttgggacatttgaccatctttgatatgcaggagaactctcactggagaatgacactaggaaacctagacaaagcaagagaacgtaattaaagatttgggcacataaggccaatgagatggcttagtgggtaaaaagagcttgccccacagcacaacaacctgagtttgatccctggaatctatatggtggaaagtgagcactgaatctcaccggttgtcctctgatctccacatgagcaccatagcacacctcccagtgtgtaaatgaataaaaatgcatgtctctgtaggattctctaaaaagtaaagagtaaaacaacagcaacaacgtgtttggcacataattatagataatattacctccaaaccaagcacactaagctggcccatcagtctcgtctattcagaaggttgccaggtactgctcagattgccttaggctgcctctgcataagaggatggcagtctgtgtttgtatgctaactcactttgccttgtcctttagcccagagcaggatgcctggcactgtccccatcagtttcatggtggcagccatgaccacctgaatccactggcacatcctacattgtctcgggtcttgagcgtcaggacaataaagggtttgtctgccatgcggacgtgtgttctgaaatgctgctgagatttctcaggttcaggttttaactgtttgcatgctgcaactaacagttaaattggtgactatctcagtgttttctaaaccaaacagttaagttccaccttcagggtttggcagtagctttccagttgtgctttttgccactcggtgtgcttaaataggtgcatttctgtaactgaagtgaatttatttaggaaagtttgtgtttctgttagaggtggaaggctggacaggctacgtaataggtggtgaccagaaaacatgacagaacaggtttaaaactaagatggcagggtggagcatggactacaatgcctccaccaaggctgcttctctggctgttgagggctttagcttttttacttacagatattgaagtggcagcagatgggtttccaccctgtcactgcctgccatggtttgacgtttagtcaaaccatgctcaagatactttgactatccacatcctacaactactgacttcattagtgcttcccagcactggctgttcttccaaaggaccctggttcaattccacattgtggctcacaactgtctgatatagtactgtgatggtttgaatagatttggactcatgtgtttgaacgcttagctcatagggagtggcactattaggaggtgtggcattattggaggaggtggggccttgttggaggaggtgtggccttattgaaggaagtgtgtcactgtgtaggtgggctttgaggtctcccgtgctcaggctctgcccagtgtggagtccagtctcctcctggttggctaaggaacttagtctccttctgctgcctttggatcaagatgtagaactcttggctgctccagcactaagtctgtctatatgatgccatgcttcccaccacaatgataagagactgaacttctaaaactgtaagcaaacccctaactaaatgttttcctttataagagtttgccttggggccaggtagtgatggtgcacgcctttaatcccagcacttgggaggcagaggcaggcagatttctgagttcgaggccagcctggtctacaaagtgagttccaggacagccagggctacacagagaaaccctttctcgaaaaacaaacaaacaaaaaaagagttgccttggtcttggtgtctcctcacaataataaaaccctaactaaggcagaaatcctctgagaatagaaaaagtagtcactcaagatatggaggctcctcaaaagcagccaaaacaagtgggacatttcttggtcaactctggcttctctctttttaatttttttctttttacttttttcccaccacacaagcgttatacagtgccatgcagtttccagtagtaatgtcccagaacctgtatgttactataactctatttaattatcccagaacttgagtcaaagaggtgacttgaatgtcaagaatgccaggcgctgtgggaggactgtggagtagttaagaaggcagcaatagagtcactcaacagcccagtaacattacagagcaggatcgccgcaacctcctctggcttcggcatgcatgtggatgcacacttgtgcttgcacatacatgtgcacacacaccagaagctgaattctgagatgatgagtggcaggctgcactgaagtggtctgttgtagctgggttcctttttgtgtatatgcaagtgcatgtgtaaatgctcatgcatgtttgtgaaagcatgtaggtacatggatgtatgtgcctttgtgtgtgcatgagaagccagggactgtgtcaggtatcgtgctccaaggcctgaatccagtttttagtgatttccatctctgcaaacaagtgctggctagactgaagagtaattctattttctgatatcacttctgaccaagcggtaagcatagagaaaactaattcccgatgctcataatacatcgttaaataaattactctcgtgcgaataccattggacagtttgtcatcaagatactttgtttccctgtcaacgctgagagagtgcttctgcgaatcaatctacttgattgctgttttctgattgcacaggtgtgcgggtcacacttcaaattcaatcttatcactcaagaagttcagatgtggcctacgggttttccacgctgctgggaacctagggtagtgtgaaaatttatatgcacacaaatcaacaaatttcttacatttctcaaagatctccttgacctgccaagaagttgagaagctgcacattgaaataatctgttggttttctggggcaataagcatacatttggcgcctactctgactccatctattttattataaagaacacaaaacacatgttttagaaataaaccaaactgctcgacctcgggatatgatgctttcccctttatacacaatatgaccagagttactactttcctcgcccgttccttaaaaacactttcacacggaaggtcaccaaaaaccctcggtcttttaagtcaatgttataacaatatattttgtacgcgtctggttcactgtaacatctattaaattcttaacactgaactggcaagatggctcttaagattaaggtacttgcccggccaaccgggtagccctaagctctatccctagattctggagtttggaatatgctgatttaatcaacagataaatgagggagtcttttaagagggaaactgtaatggattaacgaggcaatcttctgagagggtaactgcaatagactctagctgctctgttctcatctcaacagccttctcaagcacttctgggtttatgaacacagtctgtagactggaaaggaaaaaaaacaaaacaaacagaaattctacctttaaaataaacagggcatttgtttgtttgttattttttggaacaggttttctctgtgtagccttgactgtcctaaaatgccctcttgtggaccaggctggtctcaaactcttagaaatcaacctgccttaaagttatgcgccatcatgatggccctgataaataaacagtattttattgaagctgattccttccctttcttcctccccccacctcccctttccctccctccctccttcccttcctcttgtttcttcagtaaatatttatgttaatattagtctgacatcaatgatacatactaaatgacctccttgaccttacattaaaacaggaaaatagctctaatggtcagggtgaggcagagtaaaacataaaaacatggcaggtggaggaaagtgcacatcagaggaggaatataaagacggggagaggccatagaaaggctggaagttgccttcaaaccatcagaatcaatgtctgctatcctatccttggtttgtaaatggccattttatttcatggaactgcaggtggtagagagctgagcccattggccttatttcttattataaaggaactgagtcagcacaggagcaaaagcatcgccttcgcgccctaatcacagcctaaagccttcacttcctcaaacgctcacactggagactccggttccaacccagtgaatttattgaaggagctcaggtattcaacccaaatcggaagggcctcattgaaaaagtgacacaaatgaagtcctggatgaattaaatgtggggaaagagtgggctaggctcatatctggggggataaaatcatgaagaaatgcaaagtttccccgagtgagagttgcaatggagaaaaccgagaaacctgagagacacactgagaaacacaagaagcaacgtggctggagtcgagggagaaagaggaaacagagtcccggggaacacatcgtgctgagctctgtaggtcgtgatgcataacctatagagtattatggtatctgtgtgtatgctcacacacataaaaacacatccatgtatacatagttattttctgagtgagttaagatgcctatttattttgataaactacctccattcctaaaaaaaaaaaaaaaaaagcaagatctgacttacattttgctaggatttccttgacttgtgagcgtctcagtcaagtaagagacagtgatggcttggatggcttgcagcagttggataacagagagagtgattaaaaaaaagaagaagaagaaaaaagaaaaaaagaaaagatgggatccaaggtttattttgaaggcaaatccaacaggatttcctaagactaagtggtcttagcaaaaagacaggagctagtaatgtcctagcctgggctctcatgaaggcaaattaagcatgagaattctggcacaatctgagaattcttgtggagattgattccgcggaatagtggcatgtagaaatgaagacgtcagtcagggtaggggtgttagcaactggtgtgcttgcccgtatctcaggaggtcacacagaactcaggtgctaagcatctcaggactctggcagcaggaaagggggggggggaggaaacgcatatccccaggttcttgtccctgggagatcgggtgcaggatactgactctgccaatcttccaggtttcttgatcacagagagtgagctatctgctgggctattcaattcttcagtgtttacatgctaaaaattgttataatgcttatctctgataaattattatttcaagttgactctcattttaatagtttttgggttggtttggattttggtttttgttcgttggtttggtttggtttggtttggtttggtttggtttggtttggtttgtttgagacaaggtatctctgtgtagccaaacttgctgtagaccagactagtcttgaactcacagatatccacctgcctctgctgggataaaagatatgtgttacctctgctcagcaacagttgtgtgtgtgtgtaggtgtacatatgtgtgtgcacacatggaggaagcaagaggtcaatacaggtgtcttctttagttggcatttatctttttagatagagacttattgaagcttggctcaccagttcaattcagctggcctgactggacagcaagttccagtaacagcctgtctccacctccccacaaattggatcacagctgtatgctccacgctgaggtttttgtgtctgtgctgggcacatgtgtcatgtttgcaccacaaactttactaacccttgactgactaaaccatcaccccagcccccattttaataatttttaactacagcaagaactaaatgtccttttctttactttcttaagaactcaccaccagcctgtttcctttgttcaatgatgtgtgctgcgtctgtgccctccagacccacagtgtgttttcgtaaacacatacaccttactttttactcagaggttatataaggctggtgtttgactctaagttagacttttccattaagacctggaaatatcgtctttcttcccttttatatcatcaccaagtcagaactcaagcacagacctgctgacaggaattcaaggcttttttcactctagatctatcttcctaaataggacttgttctgtaaccatatgcttggcccagggagtggcactattaagaggtgtggccttcctgggcactgccatgcttcttgccataatgataatggactgaacttctgaacctgtaagccagcaccacataaagcattccacctctttctaaatccaaagtccccaaatccatattcctccaaacaaaacaggatcaagcctataacagcaatatcccacttctgataccaacttctgtcttaattagggtttccatgctgtgaagagacaccttgactgaggcaactcttataaaggaaagcatttaattgggactggcttactggtactgatgttcagtccatgatcatcatatcgagaagcatgacagcatgcaagcaggcatggtgctgaaggagctgagagttcaacatgttgtcccaaaggcagctaggagaaaggtctcaaagcccattccccacagtggcatacttcttccaacaaggccacaactcctaatagtgccactccctgggccaaacattcaaaccaacactacttttattgttttcttttcctacaacccttctcccttcccacccctcaatactaggaaggcaggaaaggttagaggcaaaagggggagtagatctctttagactacttcctgttgagtagagtcatcaagttccatggggcaagccctgccttcatcatcaggatatctccaaccagcaaccagcaaccataaaaaatatctagcagcagccaacaggaccagcagtagcagagggagcaacagccactgtttgttcgttctctctctctctctctctctctctctctctctctctctctctctctcaatttaaaccctctgaagactcaacagaattctaaacataaactaccttcagctggcaaaaagtcacacccctaccagagcacaagacaaatcatagtcagctgctgtgggcagtctgaagcagccccatattccacaccggggaataaaacaaaaaaaaaaaaacatattcacataatataagtggagttttttgaaaagcccaaattctcactacattattccctccctctttctccccctcttctctctctttccctcccctctcctcaccagctcttccttctgctctcagctgtaacatttgctccacagtcactctgatttgctaagtaacagcacttgttacattcacaatattgtctgaccatcacctccatctagtttcaaatattttcctctgggccatgaaagaagaacttatactaattaaacgggccttcagcattccttccctgcccctctcagcccttggcaactgctaatcagcagccttctctgtggttttacctctccaggacttttgttataaatagatgctgaggatgtgccctcttgcgtctcgcttctttcactgaggacatcatcacattatagggatagggatgtgagcgattacataagggaccccaaggagaagcgaatgtaaacaggccaatctgactacattactttccagactttttgtcataccagcatagagagcaccccccccccagtctatgtctcagtatcttaccttagatataaaaatacagacattgaaatattcacctctattttcagacacttaagcaccaaactcctttccaatattaaaacagtcttgagtgcccaactggtgaaagacattatttttagccacttggctgaagaattgtgtaaatgtgttgcttctgggcttcttggcaatgttaggcaaggagatggtgtaagaggaacacaaatgccatggtctgtaactctttaacgagtcagtattcatgcaaaaggccgttttctgttatagagaaatcgagaagcaagtgctgtcccacgttcttcttttttttttttttttgtttttttgtttttgcttattttcttggatattttccttatttacatttcaaatgttttcccctttccaggtatccccttcagaaacccccttatcccatccccccctccccctgcctctctgagggtgctctcccaccctcctccctggcattcccctacactagggcatcgaacaccctcaggcccgagggtcggtatcacacttctactggggttttctataatagtttggcttctacacctcattttatatctctattaaatgtttagacactattccaagaaagaaatgttgctaaggacataattttatttattgctttttatatttatttattttatgtgtatgtgtgtattactcatgtgtatatctatggcactatgcatatgtttggtgtgcacagaggtcagcagaggccattgggtcccctggaactggagtgatgggtgattgtggaccaccttgaggttgttgggaattgaacctgagacctctggaagaacaagtacactgacccaactctctgccccactctcaagggatttttataaatttaaacgagagaaacatattgctcctcttttttgtctttttttgttgtattttgatttagcatttgagacaagatcttactgcattcccctcgccaggcacaaactcatgtgaatcaagctagtcttgaactcagagatcttcctgcttctgcttccctagtgcttggatcaaagatgttcgacagcactcctagtctttatcagtgcttctatctccaatgtttcacacacacacacacacacacacacacacacacacacacacacacaccttcgttcttaaaggaagaaggcataggatcaaattctcaactcctataggtttcttggttacttacttcacaggctaaactcagtagggaagacctgtgagacctgccatacccttccatcacatggttataatgaacgcaacactagtagcaaccatccctcatatcactgcttaggtaggaaatgtcccacagactcatgtgttgacttgctggcccctggacggtggtatgattttgacactttgggaaacacaagtagctcctactggagcatgtaagtcattggaggtgtgtccttggagaacgtattcccttcctgtattttttttttctgctttctgttcaccaggagctaaaaatttcccctccatgttgtatacaccatctgccatgatgttctttctgcccaagttgataggaccaagcaaccccacactgcaccctctgtaaacataagccaaaataaacctttcctctcagaccttctctcgggccattttgtctgatgaagagcaacttcatccccagatggtaatgcaagcttggaacattctggaaactttagggagcagagcctacctgcagaaaggcactggagcactggttctcaacccttctaaggctaagatcctttagccacagttcctcatgttgtggtgacagccctccccaaccataagattattttgttgctacttcataactataattttgctgctggtatgaattgtaatgtaaatatctgctatgcagccccaaagaggtcacaacccacaggttgagaaccactacgctggaggcatgtttctgaaggttatactagttcctgccctgttcctctctctttgcttcctttctgacaggaggacagtctccttttccacaggatgttgctgctataatatttattctgcttcagcatgaacccagaatcagcagagtcaataaccatgggcagaaatctctgaacccaccaaccaaagtatggccttcctccattagatactttccattcgatattttgtcatacccctgagataagaaactggatagcctataatgtgccttggtcaaccattatagaaacagtggtacaggttagctgttatcgcagacagtgccaggtctgagagattgtgccatccagcctcatgtaactttcattgtgaatattacaccaatttgtagaggttaagcctccatgcagagaccattcagtatctgcctggcatcagggctaggccactttattaagaaagcatttgtccgcctcaacaaaagaagccatataaagatttacaagaatgagtttcccctttcaaagataatcatccctgagagttgtcatccacaggggacagtaattgaaattctcatttgcaggtctcagccctaatagagcccataaatctgtaagaatttatctgctctgtgtcagcgtttggctaacaagcctgtcagtgtttccagatcctccagatgcccgtgtttaatgcttggctggtcttcttatgtagcataaccaaataggcatttcacaaccactctcgacccctgcaatctaaaacaacacagccagaagctctgaaatgtgttccgtgaagcatgaaagaactcattaaggctctgtcagtttcagtcctgtgcaacaacacagggtctgatgttcttatgaggattcctcttggcaccttagagagaatctgggtctcaggatcaaaagcaaacagggtagcttggagaggctatgacaaggttttccttttatattatatctgacaccttcattctaacagcagcaaaatggagaaggaacggtattacacataaacctgcgttgcctagacgtcatgatgacaaccagaggttttccacctaatagcaaaagttattctatgaatatttaaaagtattaccagtgaagtggttagagccagtttgctctttccaattagaagttaggggcacatgtggtgttatttcaaggctggcagttatgagcccttgagtgctcatgacctagtggccggactggcagacccaaagactttatactgaaaactccaaaagctaggagctgaacacggtaggcttaaaaacgtaaaaggcactcaagctgaaggcttatctctctgggccttgactaacaacatgctcccccacatactcaatgctaccaccatatacacggttagcagctagcctgatccttggttccacagagagctacagttgtaaacagcggctagcaggatcaggtaggtaccacttacttgtgttctggtcttaaacaggcttcaggcactaggaccttcagccctagagtgttagccctttagactagttagtgtttcagttctcaggccaaggatgtctgagactcttggttcttcagggttgtagctcacttaatctctttcagtgactaaaggccttttcctgtagcctcagatttctctctgctttctttctatatctatctctcttgtagctgctgctgctcctgccgccgccttctggctgttgctgctcttccaactgctcttagaacatcatctgcccatccttactattgttgctactgtcatccttagggtcagagcctgagccttggcaactctgacaagccaagctcacctacccactcaaaatattccaactgaactggcaactaacagtgaagagcaaagaaaagagatttattcagtgcaaccacagaagaagaagaagaagaagaagaagaagaagaagaagaagaagaagaagaagaagaagaagaagaagaagaagaagaagaagaaaagaagaagaagaagaagaaaagaagaagaagaagaagaagaagaagaagaagaagaagaagaagaagaagaagaagaaaggagaaggagagagagagagagacagagagagagagacatagagagaacgagagagagaaagagaaagagaaagagaaagagaaagagaaagagaaagaaaagagaaagagaaaaaagaagtctgtgacctcccaagttcatctttggtgtcctaacatggggtttaggcttaactagatagcaagaggtgggttggagagatggctctgtgattgacactggctgcacttccaaggatgagggttcaattcccagcacccatatgaaggctcatgaaagtatgtgactccagttccaagggatccgatgccttcttctggcctttgttggcacaacacacacatgcaggcaaaatactcatacacatacaaatatttaggaaggaaggagggagagaggaagagcaagagggggggaatggagaaaggaaggaaagaaggaaggaaggaagaaaggaaggaaggaaggaaggaaggaaggaaggaaggaaggaaggaaggaaggaaggaaggaaggaaggaaggaagggactatagctggtagagcagtactggccaatatgtgagcctgtctatcactgactcctcattatcatctcctctgtctcctgcaaggccttctgacaaggtgttagagctgtgttaaaatctttttcttggcagacttttatcctctcactggttttagccttttccttttcagcatgcgatccctgggaaaattccaactccttggggatcattgtttcaacggtctgattgcctaaaggaggggcacaagtgtctcttaaatctccactcctgccaacatgtttacatgaccaccgtggccactgccactaacccactgagtcttctacagcccccagtgctatcaggtcatcctgctttactaatgctaaagaccaaaagtcattctaggacagcctttattgtgtctaatgttgcaacaccagggggcagtacagaaagggcgtctcttagctgacccatacattacactcaacagcctgcttctgaagccagaatcgagtgtgccaacgacaggagataaacatgttcacggaggactgtgtctcagtcacagcacagtcccacatgcaaaggaagtagtgtgtttgcagaaattgaggtcttttgctgggccagtcggggaagcacccttcctccttggcttgggtgaaaagagtgacagagttgtgtgtattgacccaaaagactggcccaagatgcttgaaacagccacagttgcaatgtagcttcctcaggttgtccacaaagttttcataccaactgggtcagtatgacagaaggcagtcctcttggctgtgggtccatagttcttcaattcaagtcatcagggacacgggtgagggaatggcctcacagctgtcaatcatcccagcctccgacatcataacttatttaaaggaaaagacacatttaagagggccctaacaataaaggcttattataaacagtgtcttatctatatttaacagttctctaacaatgtttaatgtttgcctcattgccccagggagtagtaggtggtgcctataatctatctcaaaagggtattgacatacagtttgaatagcaatggagattttacattcagagagttttaatcagtcacaagccttttatcaaaacatttaaccatgctgtggcttgcctttggtatctgttaaatgaaaactgtaaagtggttcaggccttcaaagaagtggtaggaaagcctcttcaagagtcaacatgcgtcttactcagcaaaaacgggaagtcctgatttgataaatattttggttgtttcctggccgactaaaaaagtaacccaaacagctagctttgttaaagatggacttggagggaaacatacaataaaaaatgaaaaacaaaaagaaaaactgaatactaaacccccaagttcatcgcttcctcctccaccctcggaacgcatggctgccatttccactcttccttgcccctccccgtctcgtgctcataaggaatgctttgcccttgttttcctggagattttcttcccattcaccccttacatcgtgcgatccggctcttgcccccattactcaattgaagaacttcttgctaaagttactgcaacatttgttgcaaaacccaaaggacgtttttttaggctcttttccagtttgaatgtttggtggctttctccggcttatggcttgccctggtctcatccacgccatacctcttgaccccctggtacatcagtggaggctgctgatgtacgatgcagaaacgtattgagctgcttcagtgtgccaactgcgagcactgcacaacatgaagaacacttgcagctatacatatgtcaactccagtaggatgttcatcctcatgaccaccacactccaacccttgctacagagatctaattctttgtatacatttgaggaagattgcccaggatgcaaatggacttttctttcctaggggaatcttagaagagagtggttggggggaaaacacacacgcgcacacacacacacacacacacgcctctaacctgctgctgcaaaattagtagtttcacgtcttccccaaagctcattctaaatatcacccagtttccacctttcctggcaatgaaaacagctagtcacatggtcaaggcactcattgccaaagttctgcagctaaaattaacatacgctaattaagccgagaccgctgcatttgtctgtttgtagtgaggtacagtggtgtgccaagtggatcttctgagctgctgcaatagaataacagcagcctgttgcttcttccttagagtctataatttccccataagaagttaactactgtaatcttctctgtagatgactggagtgcccagatcatggtagactttgtaattccatgcagagtgtggaatgataggaatagaaagatcagagtcctccactgcactattggctagaacagtgaaatggaagaatggagagatggccctttgattcctagattcatattctttctaatgggaaaacaacacctgcgggagaggctgagagtcagtgggtagcccacccaatggcatcccaacacagaacactataacccacgaatagacacttccattttacttctgaacttctgcgttgtgtgagacttgctagaagcagagaagagagattgacggcggcaggacgactcctttatatctgagtactgctgacactcggctgctgtgcttaggatcccctacgactgtggatcagattcagaaacctccccagacactgatgctctgtgagggtctatgggaaagagaagcaaccagttgcccagaataaaggtttacaccacggtggcaaaacactgtctcttctaggaaaagactgtggtctgcttaggggaactgtgacacggatctctgtggctgacttgacacctttaactgggagagcatgctgttggcacctttgctgcctctgcggctgacactctgtcaatgaattcgtccggttagctctgctggtgagaaagattggcaaacgccagcttgccgagtcacccttcgttggttgttcagtgatttttttctatagtggctgtcggataatatatgatgcaaagtgaatggagagatggctgctcttccagaggacccaagtccaatccccatagctgatatgactctctcagaacctgcataaaggtagaagaaaagaaccagtaccccccacaaagttgttagttgttacaagctccctaccacctagaactctagcgccagagaacctgacaccctcttctggcctctggggatgggtacacacacgacatacacatactcaaacacacatacacacacatacaggaagaaggggaaaaaaaccgtagacctcaaagtacaatttttgctggatgctgttggtttcacactctcttaaagtcaaaaactgttaagtgttgccatctatacttttttaacacatcgctccagaaggtaagcaataactttagtgccttcatgaaagtccctttatggctctcctgggccccaaagtaccagcttttccttgttattgagttctttcttcttgtgtgttttcccaagtgtcctctatcctccaagcagtggcacgctcttagtccttctaataatgacactcagtctcttcttcagtcaagcagtttgcagttcacaatgtcctcatctgtaagtttcctttaaatcaagcagagcaatcctaaccttcccaagtgccatttccaagacaacactggttgcacagaaagcaatttgctgtagcactttggctcttgcttgctgtctgtgtttatgattgctggttgtcctgttgttgttgggttgtttttttgtttgtttgtttgttttgtttttgtttttgtttttcctgataagccttgaatactgcttgttcttctatacaggcacttgaaaaatggctctgttttcttctattagttacgttttaacactgcttcaagccttatgtggtatcccacaccttttcgaaatacaaaagtaaagtataattgcaacccacacttttaatttgacaagacagttcgcttgtgagtcctccaacaggtctctgagctctgggagctctctgttgccccctgctgggaagtgacggactagcgtttggattattactggggaagcattgttactagaccttactggaaccccacaggttctcccttccaccctcactcgcctctcactgaaactgtttcttcatcttctagtcatttatcgtctgtgtttagaatgacttcagaagatcccataattctagcaaaacctgtgattatgtagatagttgggttttttggtggtggtgggttattctgatttatttgggaggggtgtgtgtgtgtgtgtgtgtgtgtgtgtgtgtgtgtgtatccctgtctctctgtctctgtctttttgtctgtctgtctgtctttttgtctgtctgtctgtgttctgggttattcctgttatttggaaatactgctcttgtcctggagagatggctcagcgactaagagcaccaaccgctcttccagagggcctgagatccattcccagcaaccagactgtgaaaatactgctcttctcactcatttacccacgcggcaattattataaggactagaaattatttcagaagttatctgttctaaagcttttttaattttgtctttctattaagatttttcgggagaatttatttgaaaggatgccagaacattctcatcttgtatatctgagatatgtcaaaaatctgggggctggagaatcagcccagagttaactgtgcatactactttgacagaggacaaaaattcaattcccagacctctgctgagcagataacaactgcctgttactccagttccaaggaatccaacatctcttgtctcctgcactcatgtgaaataccacacctctgtccattgaccgcatggaaacccatgccctggctagcccccaaggaaggaatttactatccttatattttatcactgtctcctagtgatcaaagctacatccctggttacctgggttccatcctctggctcttcactggctccttagaaggacagtgtccatgctctgtgggatcacttttattagactctgaagaggaggaggctgcagatagaacatgtctgataaagcctcctaaagttaagcctgtttctacatttgttacccaagattgatccttgtcaaagtgtggcagagttgattttggcaacataagttgagtggcatctgttttaagggacaagactgaggggactagagatgtctcagcaattaaaaagtgcttggggctcttgaagaagacccggattctttttctcgtacctataattgtctttagctctactttcagaggatccaatgccctcttctcaaccctatgggcaccaaacacacacggttcacagacatacatgcaggcaaaacacccatacacaaaaaataaaggcaaataaatctttctaaaacacaaattagagggggatattgtttaaaggtactacacaagtaaatagtgaaatttatgaatgatattaaaatgcagaccgaatagtttctagatttttctctcttgaataatttgcaagtccatatatggttttcaaaactcaccaagttctggtgcttcaaattcatattatatcttgagtccaactaatgggtctcaaccttcctaattctgagaccgtttaatacagtttctcgtgttgtggtgaccaccaaccataaaattattttccttgctacttcataactataactttgcaactgttacagatcataaagtgttttctgatggtcttaggctacccttgtgaaggggtcatttgaatcccaaaagggtcactacacacaggctgagaaacactattctacaaagaaatagatagagagatagttagatagatatatagatagatagatagatagatagatagattctcacttctcaataaaatacaaacaagtccatccttttatctttccagtagtttaaaaatagttttactgaccttttttttttttgacaattccataatgcatatagcacacactgcttactgtaacccctgcatctctctgccacctcctaatccatctttttagcctgtaactctctaccctcttatgcaactcacactcttagtgaaagttactcaccagtgcacactcaagagagggggagcattccccttccccaggcaagaagctttccctactcagagagcagacttgagaactcgtgtaacacttcaagacaccctgaatatttttcttaaaaaaaaaaaaaatcacagtccagacgttcaataaccaggtctgggtccatttagaaagaggaagaaaagaaacaaattttgtcggtggagaacaaaacttgaagataattaatagtgacagatgaagagattatgcttcattttatcgttaacactgccactcttcccggattttattgcagatcctagcgaggagaggggaaaagaaaagtctagggattaaggataaactttagcgtgaggggggcattaaaaagccaagtttagagcagagcaagggcaactaaaggataatgtgactgccagagggcgtgttagccaatgatgacaaatgagctcacaaaggttcgtttgacagtctgcaaactgacaggagtgcctgtagacaggtagcagatggcacatggtatgggacctgctctaagtgaactgacaccaagaagaccgcaaggctacatcccacagcgacagcatggttacagcccacagctctaacttgtgacccagtccacaagtccgtaagggcacaatatgtcaacatgtggaatcctgggacttggggggaaataaatgtgggaccataacaaaatagcacaatagcctaagagccaaattcatgttctggtgtcaaagcacgttcatggagtgtttttataataacggagaggagggaaaggtcatgaaacaaggcgcttttcagataacctttgtggaaaccgaagtggctacagcaaagtggaaaaatcctatgagctttccgtgttggctgatgactcgtagtttcttggttggcagaacctatggttttgttaatgtatcccaaaaggtttgtatctactggttacaggatgctagggtctgcccagtaggcaaggaatggctatttagtgggtgtggtggttggaatgagaatgtccgtcacaggctctgatatttgaatacttggcccctcggtggtggaactgtttgaggaggggtagaaagtatggctttcctggaagacgtctatcagtgggaacatggtgtgaggcttccaagccatgagccattttcggttctttcccctgcttgctccttatgatgggagctctcattggaatgccccagctgccaggcttgcctgcagctgaacctcccccacggtaatggcgacagactcttcttactcctctggaaccatacccccagataaaccttaccttctacaggttgccttgattatgctgtcttatcacagtaacagaaaagtaactgttacaggggctaaggctatccctacataaattgcaattaggctgcactattcacaactcgccacagacactggggtgagaaccagttcacccacctcgcaaacatttccaacctgaaggtgcagcctcattcactctgggagctgctgctctgccttctctctgctctccaaaggatgtcatcgcatccataccacacagccagataactgggacccttctcgctcgggctaagcagtctatatataaatcagacattatccatttccatttccctgtgtaggatgttctgcagagaaagtaacatgatttcctggaatgtctatgtgctttgtgcaagtcttaaaaggaaacgatcccaaaactcagttccttgttggttctgcttgatttgatctaaattctttatttaaaaaatagagaattctattctagtctattctcctttaatatccatcagttaaaaaaaaaatactttttgtgcccttataaataacctacattctatgcaagaagttatagtgttctgttaaaaggatcgaattaaataaagacatcagcagaaattgaatcaacaattcttgttcctgtctgtgaaatgtcaattaaatcccaaggccccaacaacaaacccagaagccttatttgagcattctgatagcctttgctttaccaataagccacctctttcctctgagatttgaatcacttttaaatgaattattgggctacatgatgacctagactcccaggatttatcactgttaattttctacctctctctgaccatatcttgttaatttggagagcatcccgcagagctttgctctgccaaatgaagccttcaactaaccagcagagggagccccagaagacgcctcagctcccccagtgtcttcctgggtgcaccaggaagtctctgtgaattcaggtctgctctctgcaggaagaagtgctgttcaagttggaggtagaaaagaccgatcttttagatggtggtttattgacttatttagtgctttgcttaaggcactctttgtgctgcctattcgccaagcgtgatttcagataactggagctgaatgacccagagaaagagcagaaacaatggacagtctgctgacctaaccatgcttgcttgcctgccccaccttgtggtttttatacattaagaatacacagtagacacaggctcaaggccttcatgagctttgctggcttcggtccaccgatgacggctcctctcctccgctctcactgtttgttgtccgggtgctcatccagaaagagccccacaagagacttactggggaaagcctgggttctgtctgcacaccagtaggaaactagtctctcgcctaagatcttttgagaacggaaagtctctttcgtacaaatttctcttaacagctcagtggctcttgtttttcgaaaccctaaataaattgattctatggatccatggatggttaatgagatggggagaaaaagaaaataagctctctccaaaactgtttaagacaacactggtttgtggagtgtcgaattattaaattacccagtttgtttcttccactgtaaagatgcagtagtgatagtaatcctggctcctgcctcagtcactaatctctctccccccatcccctccccctccccctctccttccccttcccctgtctttcttgctcacttgctccctggcttgctcttgctttcttactctctctgtgcatttgtgtgtgtgtgtatgcatgtgtgtttttatgtgtgcatgcttctgtgtgggtgtcttttgtgtctgtgtgtgtatgtgtctgtgtccgtgtatgtatgtgtgagtatatgtatgtatgtgtattatgtacatgtgtgtatgtatgtgtgtctgtgtgtgtatgtatgtgtatgtgtgtttatgtgtgtggtgtagttaatcctcacatcagcccttactggtaggtttcattgttcccacctacagaggaagaaatagagggcttggtgaagaattcaatcaaggacacaagctagagagaactttctgactcaaaagccggttctcaccggttaagaaaaataaccccatcttgtaggtattttgaactgtacatgtcatttaaccgttactgtccccacttccaaaggtcctgtgaggtaagcacgaatagtaacttccccttctcccaactcctttttacctctttagctcctaattttaaaagttagcttgggactgaaaagatcgcttagtgtttaggggcattcgctgctcttgctgagggcctaggtgcagtttctggaacccacacgtggtttacagccatctggaaccgataccttcttctcacctctgaggtcatcagacatgcacagagtacgcagacacacatgcaggtaaacactcctacacatagcatttttttaaaaatccttttattaaagatgagagaaactaaagctcacaacatcaaatgaggttttctctttctgtatagagtagagctgagactggggtggggaggggcgatgtgattggcagagtctgctttgtcacctataggtgatgggactcatctttctccccaacgccttaatcccaacacagccatttaagccctgagttgttttggttttttgtttgtttgtttgtttgtttgtttgttgttttgctttgtttttaagaaatgagaacagctaccggaagatccaacaatacctctcctgggcatatacccagaagatgttccaactggtaataaggacacatgttccactatgttcatagcagccttatttataatagccagaagctggaaagaacccagatttccctcaacaaaggaatggatactgaaagtgtgatacatttacacaatgaagtactactcagctattaaaaagaatgaatttatgaaattcttgggcaaatgcatgtatctggaggatatcatccttagtgaggtaacccaatcacaaaagaagtcacttgatatgcactcactgataagtggatattagcccagaaacttagaatacccaagatacaatttgcaaagcacaagaaaatcaagaagaacgaagaccaaagtgtggatacttcattcctccttaggctagggaacaaaacacccatggaaggagttacagagacaaagtttagagctaagacgaaaggatgcaccatccagatactagcccacccagggatccatcccataatcagccaccaaacccagacactattgcatatgccagcaagattttgctgaaaggaccctgatatagctatctcaagtgagactatgccagtgtctggcaaacacagaagtggatgcacacagtcatctataggatagaacacagggcccccaatataggagctagagaaagtacccaaggagctaaaggggtctgtaaccctataggtggaacaacaatatgaactaaccagtacctccagagctcatgtctctagctgcatatgtatcagaagatggcctagtcggccatcattgggaagagaggccccttgatcttacaaactttataagccccagtacaggggatgccagggccaagaagtaggagtgagtgggtaggggagcagggcgggggtatagggaactttcgggatagcatttgaaatgtaaataaagaaaatatctaataaaaagaaaaaaggaaagaaatgagaacagcattatgttatttccaaagatcaaatgaaataaggtgtgaaggtgtttattaggtaggtaaacaatatacagacccatacaatcccattatcaatatgatcttgggttagagtcgggagccaagttatgtgtatcttatggcaaaatggcaagagaaagcaggtctgtgtcttttatttgcttcttccagtgagtgttcagtgttcagcctctcctctccataccccagttaactgcctttcccgctctctttgtcttgactctcagggagcaatgttgcttggaaagcattagaaggcatttagaggtcatatccatccttcttaaactttgatgcatctgtttgtctggactgtcctatgagatgctatccatctacctgggaagccttccacccctcattctgccctctctgacacttggaatccatcttcttgtcctttagagtgaaagcagctgtcatcactgacagtcctcagcgtctatggggctgtaccaacccatcctctgcaaatcaaaaacatcacagtgaaaaacgccctttgtgaacctcccactcttcacgtagcccagtgactctgtgctgctggattccaggcactgccccgtcatggttggatgagagctattgtcttattattcagaatcatgaaaaagaataatcagagtgttcactagcctggaaaaagttttaaagtacactttctacattttctatcataaaaataaaaaattataggtccaagaaccagtaagtcaaagacaacgtggacatcattataaactgccctggtatccatttgttacgcataaaactaagaaattgtcagggtgggactagagagatggctcagcagttaagagcacgtgggctgctcttccagaggatccagattcaattcccagcaaccacatggcagcttacaactgtctgtaactccagttccaagggatctgacaccctcacatagaaaatcaatcaatcaatcaatcaatcaatcaatcaatcttttttttttaaacctaaggaattgtgaagcagcttaaaatggagagatgggacctggcctttgccctgacctctgcagcttaaaacaaccaggaggctgcttttattctcctgggagtctgtttctcaaatgtgtgtgcatgtgcactgtgacgtggagatgtgaagggcactgagtggagagcactgtgggagcaggtgctctggacttgctagatctatatgttggattcagtgtcatttgagtactaccattgcagaggcaccagctgaacaagacaaattggtcattcatcacgagttccttaaatatgcattctggacagcagctactggtgaaataattcaagttggtgggtgtcataaggtgaaaaaggacattctagatagccaatattgatgcaagaattacaggtttggtgggtactggaaaagttaaaaaatgagcttccagtgactcaaagttaatgagtgtagtaacgtctttttttaaataataaagcacaaattggttttggaaagaaaaatgtaacaaatgagagactcattgttttaacctcagagaccactaaacaaccaaaccaaacaaaccccaaaaagttcatgcaatagcatcagaggagaaccaaagggtgggttctacaaggataatgaattctgctgacatttcctcttcttggctataagaatttttgcatcttttgcaatcataccctgttggaaagcctcgtggcttgggttgatttatacctactacatattttgatttccaaaagtgcatgtccatgagtaagtaaataggcagtctcaggatgaccgtcttcatcaaaaacacatatgcattggctgcataattgtttaaacaactggcatcctagcatcaacaagaattttcttctggtacccacattggaggatattgcatgacttgggagaaaagacaggtataggctaattcttggggactctcagagtactggaagaggaattcattaaccccttccttagtataagaatctctgaacaccactgaaaagcattcttcctttgaatgcttgtagtgaagagtttactcctttgaagagttctgtttttatgttttccaagaaagaaagagagaggggggagggaggaagggagggaggaaggaaggaaggaaggaaggaaggaaggaaggaaggaaggaagaaaggaaggaaggaagagaaacatcttgtgagggtggagccacacgtgtgcaattaggtacatatgtgaaagtccacaggcatcctccagtgtccttgccttctcccctactgagacaagatctctttgttctttactgctctgaaaggtagtgtgtcaggcttttcagcttcggagtattctcctgtctctgcctcccatctccttgtataagtgctgggattacagccccatgctactgtgcccatctttaaacggattctggggatcccacctcaagtcctcatgcttacagtgataagccactttaccgtttaacccactgagccatctccccagctcctcctatgcttccatacagtagagaaaatgtataagtattggtgttagatgattctatgagagccacatagtccaaatcagatggaatcagacttcttaatgattttgctcctccctgccactaacaagtccccacttttaggctactcattgcatttcccccacaattctttgtaacatgactttctggattacagccagtgcagatgtaggagatagaagaggtgaaagagatcgaagtgtttgtttctgttatctaatgtaacagaaatgttctttctctcagtcttgtgacattgatcatgcaagttgtctggcctcttcatgaatgttgccacatgaagtggctccacatttctttctcattgggtctaacaaattataaaattatgtagttcttaaattaagtctggttttcgagatgctgccgtgatgttgaataactgagataaattattcttttcatttctcatatagcatcaatttagtaatgctggcaaaagatatacacagaaaattcccaacctacaggtttgtgttctagatgctggttactgacaatacattttacacagatattacatttttagacccgcttaccaaaatgtgtcaactcctggaatgcctgattgtgacagaaatcagacacaaagcaaaacatgacctcaggtttctgctttgttttagttttagttaacctgaaccctgcacataactagacctagcactctaacagtgttttgttttgttttctggattaatatgaccgagccccactcgagagggccccagttgcttgccctcctctattcagctgggttaaagatgccctggctgtgtgctctggagaaaaattgccttacaacctgagtgagcccagtgagggtgggaagaggagcactgcagcagatagatgctctagattgtctatgcgagagtagcatgaggtcgacaagatggctcaatagatcaacatgcttgtccccaaacctgataaagctgtgtgattaattccttggccccaagtggtagacaacaagaattcatcccataagtttttctctgaactacacacacacacatgttcccaagatttgcacatgcatacacgtgcacattctcacacaaataaaatatgtaaataaatataaatttgagaaaagcatatcaatagctgctcgtctaggtcttcattggttccgtttagagttataatcttgccttcgtaacagtattgggcgggctctctctctctctctctctctctctctctctctctctcgtgtctttctttctatgttttcttagatagggtcttattaagtagccctggctggcctggaactaaactgacctctaacccacagagatccacctctctctgcctcctgatccctgagattaaaggtacaatgtgtgcccttttcttctacattggcccaagtcacagccttacccaagctctttcacctttcaccccgtttccttaaagtcacaatgacatcctccagttttacatcacttgtcctgtaggcactctgtatggcttatacataaatatatttatgtgttgaaccctcctaagatagaaaacatccatttcttgtcgttctgtgtctggctcgttttgcttcaattcgtacatttgctctcctgcatctgttgctcttccactcttcttctcaggagaataaaatctgttgaatgtttgcatcacattttctcaatccattcatctgttaagtgatatctaggttgattccaaaccttggctacttgactagagcaacagtgctcatgaccattatctaaggtccatagagtgccttcgcacagaggcagacgaaataaataaataaataaataaataaataaataaatggcaatattaactttgagataatgagaatttttgcttccatggttatcaaggaaattggtgtgcacttttccattttaactttgatctgtccttacctggattttaatatgtgggtaaaactggccatgcagactgagtttgggtattcctttcctttcctttcctttcctttcctttcctttcctttcctttcctttcctttcctttcctttcctttcctttccattttgtgggacaggtgcaggagaaatgatgttggctgctccttgaaggctcagtggaacttagcagtgaatccttttggtcttaggcttttatttgtcaggaggcttcttattccttcttatatcttatccttatatcttattccttcttatatcttcttaatttacttttaaaaggaatttgtcaatctcttctagttatcctatttgagaaacacgtttgtttcactgcaatttatttaataccctgcctttcatctccaattttattaatttgaatttttttctctctttttgggtagtttgacccgtggcttatcattgttgtcttcttttctttctgtctttctttcaatgaactaactcttgggtatattatctttaagtctccattttattgttttctgccttgattttttttttcctggacatctgctgcttttagatttgacgtattcttgattttctcagactttgaggtatatcattaggttctttgaactctctctctctctcttaatgtaaatactcatagctatacactttaactatagcttcagctataactttaaccttaagccgtaaactttaaaactgccttagctgttcccaagggttctgagaatttctgttattattttcattttagtctaagaatttatacaaattcttttctggtttcttttagtgacccccatcgtcattcaagagtgttttgctcacaaaacactcattctgattctttttcaccaggctgtgtggaggtgggttctagtccgccatctcacccagaagtccaaaaatgaagcaattttatgtaaagtacttagaataaagccaagtacataggaaaaactgcagtttagtactatcatccttagtccttattgtcccatagttttccccgcctggagagggtagtggtggggacacagagtaggactctggtgtggctttaaagtctgagggcttccagatgttctagctctctaactgtactgaagtgctgatgataacttaaaaatcctaaaacctttcttactctttctaagggtaaaaggctgctggtttaggggattaacacctgtagcctaacaaaggaaacttaagcaatgtggcttttgttctatctcagcaggaactgcttagctctaactttcagtctactagtctgaaagtagcaggaagaagaaaggactttgaaaagtgattatacttttctatacttttttattactaagttctaaaaagtttcctatgaaagctaactaaggggtaaagtggaaagaagatactatgcagggaagggggaaaattcttctaagtggggaaaaaggaaaaaaaaaacttctctaagccgggaaaggcgaaaaattctcctctttccttctcatctctatgttcttagtacttatacatctttcagaatacatggtcacatattaaagagttcatcacggggctggtgagatggctcagcaggtaagagcactgactgctcttctaaagatcctgagttcaaatcccagcaatcacatggtggctcacaaccacccacagtgagatctgacaccctcttctgctgtgtctgaagtcagctacaacgtacttatgtataataataaataaatctttggtcctgagtgggcagaggtgctaaaaattcaattccctacaaccacatgaaggctcacaaccatctgtatagctacagtgtactcacatatataagataaataatttttaaaaaaagttcatcacaagttcacacaaaatatcaaatcataaattgaaatagaagtttacaatagagaatgtttacatgcatatccattaggagtaattatctggctaaacatccatcacctgtctcagctccacaggttcactgaaggtttaaaaccctaactaagttattagtgaagttttgtatagataatcccagtcagtattttatcttctgtcctagcacctataatacatcattagttcccttttatgagttttagttaattgttttacaacctcttggaatgtgctctgagtaggagaaactctggttactacctaagagcaattaactggtgacacttgggagactggcagagttctcattgcagttttgactatcaaaaaaggacctaatagcggtcccactataaaagagcttaataatcactgacataattttgggaattcttataggctcatcattaacactgaagaagtcatctatttgcctatatagcatcactacaaatcagaacatcttcatagatgtgcagagatctgctcaaaaggggtgggctaatacctagttattgtttatatgtttaataacaatcggaaaagcatattaatagaggaatcattcctaagtgaatttccttaggcattgcctgataagactgaacttgttgcagattataatccaaagcagaccatctcaggaagatcccctgctagttattagcttgtcctattatggctcctgacatttctccactgtggagccttccaccagaggaaccatctcaccaaaacctgaaactgtgtttaaggcttataagagctgtgggtttgttatgaggagtttccccacaataaaatccccattcttgacttgatttccccatagtcaatcaatccaccatcagctgctttctctttgtgctttaaaggaaacaccatatattcccagttcttatttactgctctatgaaatggtaaatgtggtttaacaaccccagcacacaactgtgtcacaacttatttccagtgaagccctcaaaagagtaaatcaccagctataaactcactgtttactttgtatcctgtttaatatttctgtagcatatgtcagtgacacactcagttctcttccagcctaatctccatgtggggttttttttaatttcataattttctcattaaagactgaccaggaggaccacatcctttgtcccttttgcaagctactcaagtttcttagaaaacactcatccattttaacatgtcactgaccctgaactctctcttgtgcttcagcccacgttccccattgccttctggacattcctcctggaagactaacaggaatcttaaattcagtgtatctcaaccaaattacctaactcccaccaattcttttatagtggcagcaccaaacctaatcacagatttagtcaggtgtccatcaaatatgtgtcaagaatagccttttgatggcaatccatagtacaaagtatatttttccattatgcctcatgttagagacatattaatatgcatatgtcctactttacttttctaagggatggtcatgatagcctctgttggttttataatgtatcactgggttacaatttacagtgaccaatcacatacagaagttataggaagaagatagtttaagtttttttggttcaagttagtacatggtgactaagattaggaattaggaagtatacttgttgggcaaaaatgaaagcaggacattttgtttttaaccataattcaatgtaattcttggctggtccattttagatatacgcccaagagctgttagagtaatgtcatatggatagctctattttctgtttttggtttggtttggtttggttttttagtattctccatactgattttataggagttacacaaatttatattcataacatagtgaataaagtctcctctttccctaaaatttggctcgcatttgtttcttgatagtggtcattgtggtggggtagggattctcagagcagttctaatgtgtatttccctgatgcctaaagatgttaaatacctctccaaggatttactggccatttatatttgtcatttgaaaactaactcaattcaataacacatttattgattggatgattaattttggtgcttgttttgtggctccttgtgttattaatcacctgtctaatgtgtagttggtaaaaaaaaaaaagttattttttattctgtaggctagctcctctctggtgattgtttcctttgctgtgcttccaaatcttttttttttaagaacatgattttaatattttcaactgttaatgttcaacaaacagaatcattattctaccatatacttcattgttatgtctccattttcatttctgattttattaatttattaattggatactgtctctgtgccctctgggatgccgggatcctgtgatcctgtggtcctgggcatattagagcatccgggagtggaacttcctctgggtgttgtgggactgactgtagagttcacacccaaggtctgctcaaggcactagcccagaccggaaggcacttccaaatcttttgatgcttgttttccctttaagatatatttgaaatttaaactgcaaatctctatatacatatcttataggcacacattattataaattatactatatgtattttgtaaattatgaacacataaaacataaattcagagagtataagttttcaaaattatcagtataggctaatattttctatacctcaggctattgcttcagacactgtgttctggagactagctagaaagtgttatatttaacaggaaaaaaaaatgttttcttcttacactgaagtaccactgattggccatcagtactgtgttgtttgcatagtgcatcccagaggacgccactgaacataagctcttgtggtttcaaatggctcagtctggttaggagaaccaagctactaccacaaatagaatgtgactcctgtggccttgaaaccactgggttctgacaaatacagaagtggattctctcagccatccattggactgagcacagggtccccaatggaagagctggagaaagtacccaaggagctgaaggggtttgcagccacttaggaggaacaacaatatgaaccaacctgtactcccagagttcccagagactaagccaccaaccaaagaatacacatggtgggactcatggctctagctgcatatgtagcagaggatggcctagtcagtcatcaatgggaggagaggcccttggtcatgtgaaggctctatgccccagtataggggaatgccaggaccaggaagcaggagtgggtgggttggtgagcagggggaagggggatgagatagggggttttcagagaggaaacaaggaaagaggataacatttgaaatgtaaataaagaaaatatctaataaaaaaataaaaaagaaaaaggaaaggaaaaaagaaaaagaagtctttatttatgtggcctgtaatgagtgctaggactgaactaagaggtgacaagcatttctttaaaaacctttcttcttcgacagtttcacacatgtacgtagcgattgtgactctgcataacctccattgtcctctcccactcccctccctcgcttcccaacaagtctccttttactctcatgtcttctttgtgtgtgactcattgagtttgggattgacgcaagggtgggaaattattggctggattgtggctagattattaaaacggctacaccactgcagaaagtgatacctgctctcctagcaaccattgaccatcaagagttggccattggtaggaggtgtttctgtgatggaggaatgttgatgggctcagtcctgtgtagtctttacaggtaaccacagcctcagtgatgtcaaaggccatgtcacatctcgaagatgtctctttggcagcatgcctcctcatccactggctcttacattctttctgtcacttcttctgtttcctgagccttggggctggtgatacagagtggggcactcccctgagaaggcattagctctaaataatctgacctctctctgaaaagagctatgcgcctagcccaagattttaatggtaacagatactttgattaaattgcttttgcctgtattagtgtcactgataccatactccccctgtgaagtaagtggggcatgttcattttacaaatgagcaaacgtttatagaagacaagtgctcacagataatcagaggcctaggcctttccagggcacttttaactcatgtgttatcatcttgtttaacctcattagatttcacttctttaagatgagggttttctttttagggtaaatttgatttaacagaaaaactggaaagttagcaaagacagttctcaaattttccatactctagattgtgttaataaattgccatagattgggaaccttgagcaatagatgctattttctcactgtgctggaagccaaaattccacgatcaaagtataggcagggatggtttcttctgacatttccccttttctttttgacttgtactgtttacgttggcgttgtgcttttgttataatcatcgacccaagttgatccaatattattgttaataatctttacttagattcctaaacgtttcacccagtaaccattatctgttataaaatgtcatctaaaatacaatattatgtttttctattactctggacttaatgcatccttgccaaattgacaagttaaaaaccccagtagaatatgatgatgtgaagctggaaagagtagagcatatactactcaaatctgcatttaattcctagtctctgggtttgattgctagcacccatgttgggtggctcacaattgcttataacttcagcttcaggggaatccaatgtctctggcctccaaggactctcatgcacatacccacacacattatatataaatgtgatggtatttgaagatggggcctttggttggtaattggtgttacacgaggccatcgaggtaagacctccataacgttcatacaagcataatgttcatacaagaagaagaaaaccaaacagaactgaactttctccactatgtgaggatggagtacagagattgcaagcaaagacatgaaccatatacaggaagcaaacattcttgtatctcgatgttgactctctaccctcccaacctatgagaaatatctataggttggttaattcattcatggttttggtgtttggttttggcagcttgcaaggacagattatctaagttcttcttgtctaacaacctcagacttttccagatttaatggcttccataattttaagaactactccaactaggataaaaatgtttgtaaaaaatgttccccaactaggatatatctactgttttctcatgattagactagagggcatagcagttgttgggggaagagcacagataatagaccattcttattacatcttctcaagattgcctgctttcagcttgccttttccctattgaggctggtctgtgttgcctggtcacagtgggagttgtcaaaattctccagtctcttctagaaagttggtctctcccctcactctatatactctttgacagaaagttattgtttagttttcaggaagggagggttctgaggtttcacatttattatctatagagcagaaggttggggtcagttttctaaattgcctctgattcttttccatgtagttggtgagaagtactttctctgttaaaaatgaaggctggattcacagagcagagagaacagcatccgagaggtttgagcctgtagctttaagcatcttagcagctgccctgggagacctacaaaactaagtgaggtcagaaatataatgggaaatctcctcaaaactggtgttgacaaaatgagtcagctttgggcaaagcactaatgacctgtgttcagattcaaccccgaaactgtgtgaaagaaaaggtgtgtgtatctgtccatcacatcagtgaaattgttggccataaattggttcccagtaactatgtggattgctgctgagttctacctgacaaatacaaaaatctcttagattattttctaaaacagaaatatgaactttgccagaatttttaccttatatatgaactctacataggtcacattgtttctccagcatatgacatgagtattgaaattctatcaatgcgtagatataaaatgaagcaaaacaatgactgtcaaatagaaaccaaggttgttaatcttgaatgattcatgagatgtaaaaaattgtcatgtttcatacccaactttattgtaatgccagtgaaaacataaaaaaacttcctagaagtcaatatatatgaccacatattataatttctattcattttatatcatttagtaacattaaaacttgacaaagtgatataaaggagatacattgaaacaactaataaaataaatatccagtaaaaattgatgagaaaaagcacactagtaacgtagacctatttctagtaaaattgattggtaaaaagagaaaaagcacaatagcagattcatctggaataacaaaaaacctaggatagcaaaaactcttctcaaggataaaagaacctctggtggaatcaccatgcccgacctaaagatgtactacagagcaattgtgataaaatctgcatggtactggtataatgacagacaagtagaccaatggaacagaattgaagacccagagatgaacccacacacctatggtcatttgatctttgacaagggagctaaaactatccagtggaaaaaagacagcattttcaacaaatggtgctggcacaactggctgttatcatgtagaagatttcgaattgatccagttctatctccttgtactaaggtcaaatctaagtggattaaggatctccacataaaaccagagacactgaaacttatagaggagaaagtagggaaaagcctcaaagatatgggtacaggggaaaaattcctgaatagaacagcaatggcttgtgctgtaagatcgagaatcgataaatgggacctcataaaattgcaaagcttctgcaaggcaaaagacaccgtcaataagacaaaaagaccaccaacagattgggaaaggatctttacctatcccaaatcggacaggggactaatatccaatatatataaagaactcaagaaggtagactccataaaatcaaataaccccattaaaaaatggggctcagaactgaacaaagatttctcacccgaggaataccgaatggcagagaagcacctgaaaaaatgttcaacatctttaatcatcagggaaatgcaaatcaaaacaaccctgagattccacctcacaccagtcagaatggctaagatgaaaaattcaggtgacagcagatgctggcgaggatgtggagaaagaggaatactcctccattgttggttggattgcaagcttgtacaaccactctggaaatcagtctggcggttcctcagaaaattggacatagtactaccggaagatccagcaatacctctcctgggcatatatccagaagatgccccaaccgataagaaggacacatgctccactatgttcatagcagccctatttataatagccagaagctggaaagaacccagatgcccctcaacagaggaatggatacagaaaatgtggtacatttacacaatggagtactactcagctattaaaaagaatgaatttatgaaattcctagccaaatggatggacctggagggcatcatcctgagtgaggtaacccaatcacaaaggaactctcacaatatgtactcactgataagtggatattagcccagaaacttaggatacccaagatataagatacaatttgttaaacgcatgaaactcaagaagaacaaagaccaaagtgtggatactgtgccccttcttagaattgggaacaaaacacccatggaaagagttacagagatcaagtttagagctgtgacgaaaggatggaccatctaaagactgccatatccagggatccatcccataatcagcttccaaacactgacaccattgcatacactagcaagattttatcgaaaggacccagatgtagctgtctcttgtgagactatgccggggcctagcaaacacagaagtggatgctcacagtcagctattgaatggaccacagggcccccaatggaggaatagagaaagcacccaaggaactaaagggaactgcaaccctataggtggaacaacaatatgaactaagcagtaccccagagctcttgtctctagctgcatatgtatcaaaagatggcctagtcggccatcactgcagggagaggcccattggacttgcaaactttatatgccccagtacagggaaatgccagggccaaaaagggggagtgggtgggtaggggagtaggggggggtatgggggacttttggtatagcattggaaatgtaaatgagctaaatacctaataaaaaatggaaaaaaaagcacaatatatacttatgttagtaatgaaaagctacgagcaccaacacagtaacagtttaaaaaacaatgaaagttaaaaactggtgcagccacagataattcagtcatcaccagtggctcatcaaggaaatgtctctgtgacatagatggagaccattacagaaaagcatgtccaatcaatatgtggacatgtgagccccagtcgcagtgaacacatctacgactcaactcttgtacctaaaccttcagatcactgttgaaaaggggatggaaatattgtgagagccagagggtcacggagtttcctgggagactgtgtctcttaacagtgtcagaaagtacactcaaaagtctcaccaacaaggctgtcccaacatgagctgaacaagaaccacaccaatagatatgataatgtgaacaggttagtaacaggggtcccaggaagcctcaactctgtataaagaacaacagacagctaataaacactaagaacagaagaaatagcaccaatcggtatccaatacctgtgtcatccttgaaaatatacaaataaccttatacagactgagaaagttgtacttaagtatttaagaatgtatggtatacataatatatgtgaatgtgtagatttatattggagtgtgtatatatatatatatgtgtgtgtatacacacacacacacacacacacacacacacacatataatacacataaataagaggtcatgaatttgaggattagcaaaaatgggtacatagaagtatttaaagggaagaagaaaattatttaacaatattataatttcaaaaaaagaaataatttacaaaattggtgtattttgaaacagctataaaagaacctaatgaaaacaataattcctattttatttttgctctcccctcatcttataagagaattggccatgctggaaaacatgaattaatgtaatttccctgtgtatttctgagtaaaaattttgaaaagatatacctgattataaacaaatagaggtatgttcccttgaccaaacaaatgttagtgtgaaatttattaaataaggtacccttgagacaagcagtgctactataaagaaaagcatacttgcttgttttctaggagggatcaagctgatcatagtgtgtgactgtacccactctttattgaacctcggagtgagttatggctttgtaaaggaggttctcacggcactgagtagagtaagtaactcacttggaccctcggctagtgagcacagaggcttctattctaaaccgaaagatcctcctcattccagaccagacacatgtccagggggactctgcttccttagagtccagggaaacattgtctagtggtcgggcactgtttctatttggctggcctgatttaacaatatacaacaatagtccttgatgaaaagatttatatgaattaatcttatggaagtatttccacccttgagtttctgtgcgggaaaaaaagtgttctaatccttaacttagtattaaaacaggtgggatatgaatctataaaattgacctcaatttgacaaaggaagtaaatactcttataatacctttattactcaattattttattcccaaagtcaaattgaggttttttgtttcttgggggttttttgtttgtttttttgttttgtttgttgggggatttttggttgtttgtttatttgtttgtttgtcaaacgtcctgggacctcctatgacaaggaactgtttttcatttgcttgtagtctggaagagctttgaaaacactgtcagggatggtcatcatggggtctcagagggtctacctgtgagatgatgatgtcatcctagtggctatcaaatgagctgagcttagggttgaacttaatgactagaagtccagcaacaaaaagcatcctttaaggggtcctcactggatggcatgatgccaaacaacaagatttatgtaactgatatactctaaaatggtggaagattgtgtcaagcaaatataaaggcaactaaatggtgtgatctatgtgaaaagccagatcgagtatctgaaagcatagccttcagtagattccttctctggtttctcccttccttctcaactttggcatccttctgttcctgtctgggaaagccctggctttgattcaacaatcacagcctaccaaggctgtaagatctttcaatatgccccagtttcatagggtgggagcaagatggccataaagcagaggtgaccttgtcttggggtccccacaccacataggaagcatggaatgacttggagactgcgtcgtgtttcctgtaattattagtcatggtgctttagaagagcacagttgctgaagatgattgcctagaagctttccaaatacttggcgcttcacacagatagttttagccaactgtaatgacagtaaagaatcaaagagaatccaaaagaacagaacttacccctgagtttaattttgttttggattgacccttcctgcaaaataaaccttcagtctgatccttgcctttccttcagtcctgtctcacaggggtgaactgagtgctggggatgaagtcctcagactctgtttggaatattagaaatggtctggttttgaatatttgggtcatgttcacttttgatataaactttaagacgtctttgcgtcatggctcagtttttgaagcagaaaagttgaacctttcagacaacctaaacccctttgtcttggaaactataaataattgagttttgtagccatgaagttctgaaccgtgtcaaaaaaaaaaaaagtatcttggaaaactagttctgaaaacctaaggctggcaaagaagttggcaagctgaaggagaaaatgatagagagttatgttttgtggtaagggagctgaaaaggaggaaaaatgaggaattgttgtcaatttaaaattttgtattaaataaacttgtagtacatgcttgctgagatcaacaagacttttcatctacgtaaatacagctacggtgatcttaaatgtgtgttcaaagcctagcatgtggatttctaattattttaactaactgacaagtaagaccatttgtactcataatctacaacatgatgttttaagatacatatacatgttggaatggccaaactgaataaacatatgcctcgtctcaacatgtttaccacctttctgaataagtacacttgaaaaatctcctctcagtaacttctacatgcataatatattaatggtagtcaccgtgttgtataccagatctccagacctcttatttaactgaaactcggtatcctttgtacatctcccccacatcctccgtgccccctttccttaccccaactgctggtaaacaccactccatttcctgtttctaccagttcatttttcattttaggactgtctttccctaggttatttcacttgacacaatgtcaggttcatctgtgttgtcacaactggcggagttttatatatatattttaaagctgggtactgttcccgtgtgtagttagagcacatctgctttatccattcagcttctggtagctattaggttgttaccatgtcttgcccattatgaatttcactgcattgaacatgggtgtagagcccgctctacaaaatgctaatctcactcatttggttctaatccagaagtgggaatgagagaccatatggtagcccgatttctacttttcttagggacttctgcactttggcactgaactattggcagttccactttatatttacatctgtactgtagaaggattctttctcacccttcctttctccacacttgtcagctctgtcttttttctaaaagccgtcctgacaagtgtggcttggctttgcaatttccttaacaactagtgatgttgagcatttcatcgccttgctcttggccttttaaaggtgtctcatcttgagaaatgtttggttttattttctgcccagtcttagcaaagtttacttgctgttgagttctcaagttccttatacattttgaatactaactcatcagatatatgcttagaaaacattgtcttccgacttataggctcacttgccattctgttaattatttcttttgttatgcagagcctttccaatttgatctagttccattttccttccactttgttttctttcctggtctgtccatctatacaaaacttcattgctaagactagtatcaaggcacaagtcccttccgctcgactcgagactcgagccccgggctaccttgccagcagagtcttgcccaacacccgcaagggtccacacgggactccccacgggaccctaagacctctggtgagtggatcacagtgcctgccccaatccaatcgcgcggaacttgagactgcggtacatagggaagcaggctacccgggcctgatctggggcacaagtcccttccgctcgactcgagactcgagccccgggctaccttgacagcagagtcttgcccaacacccgcaagggtccacacgggactccccacgggaccctaagacctctggtgagtggatcacagtgcctgccccaatccaatcgcgcggaactcgagactgcggtacatagggaagcaggctacccgggcctgatctggggcacaagtcccttccgctcgactcgagactcgagccccgggctaccttgacagcagagtcttgcccaacacccgcaagggcccacacgggactccccacgggaccctaagacctctggtgagtggaacacagcgcctaccccaatccaatcgcgtggaacttgagactgcggtacatagggaagcaggctacccgggcttgatctggggcacaaaccccttccactccactcgagccccggctaccttgccagctgagtcgcctgacacccgcaagggcccacacaggattccacacgtgatcctaagacctctagtgagtggaacacaacttctgccaggagtctggttcgaacaccagatatctgggtacctgccttgcaagaagagagcttgcctgcagagaatactctgcccactgaaactaaggagagtgctaccctccaggtctgctcatagaggctaacagagtcacctgaagaacaagctcttaacagtgacaactaaaacagctagcttcagagattaccagatggcgaaaggcaaacgtaagaatcctactaacagaaatcaagaccactcaccatcatcagaacgcagcactcccaccccacctagtcctgggcaccccaacacaaccgaaaatctagacccagatttaaaaacatttctcatgatgatgatagaggacatcaagaaggactttcataagtcacttaaagatttacaggagagcactgctaaagagttacaggctcttaaagaaaagcaggaaaacacagccaaacaggtgatggaaatgaacaaaaccatactagaactaaaaggggaagtagacacaataaagaaaacccaaagcgaggcaacgctggagatagaaaccctaggaaagagatctggaaccatagatgcgagcatcagcaacagaatacaagaaatggaagagagaatctcaggtgcagaagattccatagagaacatcgacacaacagtcaaagaaaatacaaaatgcaaaaggatcctaactcaaaacatccaggtaatccaggacacaatgagaagaccaaacctacggataataggaattgatgagaatgaagattttcaacttaaagggccagctaatatcttcaacaaaataatagaagaaaacttcccaaacataaaaaaaagagatgcccatgatcatacaagaagcatacagaactccaaatagactggaccagaaaagaaattcctcccgacacataataatcagaacaacaaatgcactaaataaagatagaatattaaaagcagtaagggagaaaggtcaagtaacatataaaggaaggcctatcagaattacaccagacttttcaccagagactatgaaagccagaagagcctggacagatgttatacagacactaagagaacacaaatgccagcccaggctactatacccggccaaactctcaattaccatagatggagaaaccaaagtattccacgacaaaaccaagttcacacaatatctttccacgaatccagcccttcaaaggataataacagaaaagaagcaatacaaggacggaaatcacgccctagaacaaccaagaaagtaatcattcaacaaaccaaaaagaagacagccacaagaacagaatgccaactctaacaacaaaaataaaagggagcaacaattacttttccttaatatctcttaatatcaatggactcaattccccaataaaaagacatagactaacagactggctacacaaacaggacccaacattctgctgcttacaggaaacccatctcagggaaaaagacagacactacctcagagtgaaaggctggaaaacaattttccaagcaaatggactgaagaaacaagctggagtagccattttaatatcggataaattcgacttccaacccaaagttatcaaaaaagacaaggagggacacttcatactcatcaaaggtaaaatcctccaagaggaactctcaattctgaatatctacgcaccaaatgcaagggcagccacattcattagagacactttagtaaagctcaaagcatacattgcacctcacacaataatagtgggagacttcaacacaccactttcttcaaaggacagatcgtggaaacagaaactaaacagggacacagtgaaactaacagaagttatgaaacaaatggacctgacagatatctacagaacattttatcctaaaacaaaaggatataccttcttctcagcacctcacgggaccttctccaaaattgaccatataattggtcacaaaacaggcctcaatagatacaaaaatattgaaattgtcccatgtatcctatcagaccaccatggcctaagactgatcttcaataacaacataaataatggaaagccaacattcacgtggaaactgaataacactcttctcaatgataccttggtcaaggaaggaataaagaaagaaattaaagactttttagagtttaatgaaaatgaagccacaacgtacccaaacctatgggacacaatgaaagcatttctaagagggaaactcatagcgctgagtgcctccaagaagaaacgggagacagcacatactagcagcttgacaacacatctaaaagccctagaaaaaaaggaagcaaattcacccaagaggagtagacggcaggaaataatcaaactcaggggtgaaatcaaccaagtggaaacaagaagaactattcaaagaattaaccaaacgaggagttggttctttgagaaaatcaacaagatagataaacccttagctagactcactaaagggcacagggacaaaatcctaattaacaaaatcagaaatgaaaagggagacataacaacagatcctgaagaaatccaaaacaccatcagatccttctacaaaaggctatactcaacaaaactggaaaacctggacgaaatggacaaatttctggacagataccaggtaccaaagttgaatcaggatcaagttgaccatctaaacagtcccatatcacctaaagaaatagaagcagttattaatagtctcccaaccaaaaaaagcccaggaccagatgggtttagtgcagagttctatcagaccttcaaagaagatctaattccaattctgcacaaactatttcacaaaatagaagtagaaggtactctacccaactcattttatgaagccactattactctgatacctaaaccacagaaagatccaacaaagatagagaacttcagaccaatttctcttatgaatatcgatgcaaaaatcctcaataaaattctcgctaaccgaatccaagaacacattaaagcaatcatccatcctgaccaagtaggttttattccagggatgcagggatggtttaatatacgaaaatccatcaatgtaatccattatataaacaaactcaaagacaaaaaccacatgatcatctcgttagatgcagaaaaagcatttgacaagatccaacacccattcatgataaaagttttggaaagatcaggaattcaaggcccatacctaaacatgataaaagcaatctacagcaaaccagtagccaacatcaaagtaaatggagagaagctggaagcaatcccactaaaatcagggactagacaaggctgcccactttctccctaccttttcaacatagtacttgaagtattagccagagcaattcgacaacaaaaggagatcaaggggatacaaattggaaaagaggaagtcaaaatatcactttttgcagatgatatgatagtatatataagtgaccctaaaaattctaccagagaactcctaaacctgataaacagcttcggtgaagtagctggatataaaataaactcaaacaagtcaacggcctttctctatacaaagaataaacaggctgagaaagaaattagggaaacaacacccttctcaatagtcacaaataatataaaatatcttggcgtgactctaactaaggaggtgaaagatctgtatgataaaaacttcaaatctctgaagaaagaaattaaagaagatctcagaagatggaaagatctcccatgctcatggattggcaggatcaacattgtaaaaatggctatcttgccaaaagcaatctacagattcaatgcaatccccatcaaaattccaactcaattcttcaacgaattggaaggagcaatttgcaaatttgtctggaataacaaaaaacctaggatagcaaaaagttttctcaaggataaaagaacttctggtggaatcaccatgccagacctaaagctttactacagagcaattgtgataaaaactgcatggtactggtatagagacagacaagtagaccaatggaatagaattgaagatccagaaatgaacccacacacctatggtcacttgatcttcgacaagggagctaaaaccacccagtggaagaaagacagcattttcaacaattggtgctggcacaactggttgttatcgtgtagaagaatgcgaatcgatccatacttatctccttgtactaaggtcaaatctaagtggatcaaggaacttcacataaaaccagagacactgaaacttatagaggagaaagtggggaaaagccttgaagatatgggcacaggggaaaaattcctgaacagaacagcaatggcttgtgctgtaagatcgagaatcgacaaatgggacctaatgaaactccaaagtttctgcaaggcaaaagacaccgtcaataagacaaaaagaccaccaacagattgggaaaggatctttacctatcctaaatcagataggggactaatatccaacatatataaagaactcaagaaggtggacttcagaaaatcaaataaccccattaaaaaatggggctcagaactgaacaaagatttctcacccgaggaataccgaatggcagagaagcacctgaaaaaatgttcaacatctttaatcatcagggaaatgcaaatcaaaacaaccctgagattccacctcacaccagtcagaatggctaagatgaaaaattcaggtgacagcagatgctggcgaggatgtggagaaagaggaatactcctccattgttggttggattgcaagcttgtacaaccactctggaaatcagtctggcggttcctcagaaaattggacatagtactaccggaagatccagcaatacctctcctgggcatatatccagaagatgccccaaccgataagaaggacacatgctccactatgttcatagcagccctatttataatagccagaagctggaaagaacccagatgcccctcaacagaggaatggatacagaaaatgtggtacatttacacaatggagtactactcagctattaaaaagaatgaatttatgaaattcctagccaaatggatggacctggagggcatcatcctgagtgaggtaacccaatcacaaaggaactctcacaatatgtactcactgataagtggatattagcccagaaacttaggatacccaagatataagatacaatttgttaaacgcatgaaactcaagaagaacaaagaccaaagtgtggatactgtgccccttcttagaattgggaacaaaacacccatggaaagagttacagagatcaagtttagagctgtgacgaaaggatggaccatctaaagactgccatatccagggatccatcccataatcagcttccaaacactgacaccattgcatacactagcaagattttatcgaaaggacccagatgtagctgtctcttgtgagactatgccggggcctagcaaacacagaagtggatgctcacagtcagctattgaatggaccacagggcccccaatggaggaatagagaaagcacccaaggaactaaagggaactgcaaccctataggtggaacaacaatatgaactaagcagtaccccagagctcttgtctctagctgcatatgtatcaaaagatggcctagtcggccatcactgcagggagaggcccattggacttgcaaactttatatgccccagtacagggaaatgccagggccaaaaagggggagtgggtgggtaggggagtaggggggggtatgggggacttttggtatagcattggaaatgtaaatgagctaaatacctaataaaaaatggaaaaaaaagcacaatatatacttatgttagtaatgaaaagctacgagcaccaacacagtaacagtttaaaaaacaatgaaagttaaaaactggtgcagccacagataattcagtcatcaccagtggctcatcaaggaaatgtctctgtgacatagatggagaccattacagaaaagcatgtccaatcaatatgtggacatgtgagccccagtcgcagtgaacacatctacgactcaactcttgtacctaaaccttcagatcactgttgaaaaggggatggaaatattgtgagagccagagggtcacggagtttcctgggagactgtgtctcttaacagtgtcagaaagtacactcaaaagtctcaccaacaaggctgtcccaacatgagctgaacaagaaccacaccaatagatatgataatgtgaacaggttagtaacaggggtcccaggaagcctcaactctgtataaagaacaacagacagctaataaacactaagaacagaagaaatagcaccaatcggtatccaatacctgtgtcatccttgaaaatatacaaataaccttatacagactgagaaagttgtacttaagtatttaagaatgtatggtatacataatatatgtgaatgtgtagatttatattggagtgtgtatatatatatatatgtgtgtgtatacacacacacacacacacacacacacacacacatataatacacataaataagaggtcatgaatttgaggattagcaaaaatgggtacatagaagtatttaaagggaagaagaaaattatttaacaatattataatttcaaaaaaagaaataatttacaaaattggtgtattttgaaacagctataaaagaacctaatgaaaacaataattcctattttatttttgctctcccctcatcttataagagaattggccatgctggaaaacatgaattaatgtaatttccctgtgtatttctgagtaaaaattttgaaaagatatacctgattataaacaaatagaggtatgttcccttgaccaaacaaatgttagtgtgaaatttattaaataaggtacccttgagacaagcagtgctactataaagaaaagcatacttgcttgttttctaggagggatcaagctgatcatagtgtgtgactgtacccactctttattgaacctcggagtgagttatggctttgtaaaggaggttctcacggcactgagtagagtaagtaactcacttggaccctcggctagtgagcacagaggcttctattctaaaccgaaagatcctcctcattccagaccagacacatgtccagggggactctgcttccttagagtccagggaaacattgtctagtggtcgggcactgtttctatttggctggcctgatttaacaatatacaacaatagtccttgatgaaaagatttatatgaattaatcttatggaagtatttccacccttgagtttctgtgcgggaaaaaaaagtgttctaatccttaacttagtattaaaacaggtgggatatgaatctataaaattgacctcaatttgacaaaggaagtaaatactcttataatacctttattactcaattattttattcccaaagtcaaattgaggttttttgtttcttgggggttttttgtttgtttttttgttttgtttgttgggggatttttggttgtttgtttatttgtttgtttgtcaaacgtcctgggacctcctatgacaaggaactgtttttcatttgcttgtagtctggaagagctttgaaaacactgtcagggatggtcatcatggggtctcagagggtctacctgtgagatgatgatgtcatcctagtggctatcaaatgagctgagcttagggttgaacttaatgactagaagtccagcaacaaaaagcatcctttaaggggtcctcactggatggcatgatgccaaacaacaagatttatgtaactgatatactctaaaatggtggaagattgtgtcaagcaaatataaaggcaactaaatggtgtgatctatgtgaaaagccagatcgagtatctgaaagcatagccttcagtagattccttctctggtttctcccttccttctcaactttggcatccttctgttcctgtctgggaaagccctggctttgattcaacaatcacagcctaccaaggctgtaagatctttcaatatgccccagtttcatagggtgggagcaagatggccataaagcagaggtgaccttgtcttggggtccccacaccacataggaagcatggaatgacttggagactgcgtcgtgtttcctgtaattattagtcatggtgctttagaagagcacagttgctgaagatgattgcctagaagctttccaaatacttggcgcttcacacagatagttttagccaactgtaatgacagtaaagaatcaaagagaatccaaaagaacagaacttacccctgagtttaattttgttttggattgacccttcctgcaaaataaaccttcagtctgatccttgcctttccttcagtcctgtctcacaggggtgaactgagtgctggggatgaagtcctcagactctgtttggaatattagaaatggtctggttttgaatatttgggtcatgttcacttttgatataaactttaagacgtctttgcgtcatggctcagtttttgaagcagaaaagttgaacctttcagacaacctaaacccctttgtcttggaaactataaataattgagttttgtagccatgaagttctgaaccgtgtcaaaaaaaaaaaaagtatcttggaaaactagttctgaaaacctaaggctggcaaagaagttggcaagctgaaggagaaaatgatagagagttatgttttgtggtaagggagctgaaaaggaggaaaaatgaggaattgttgtcaatttaaaattttgtattaaataaacttgtagtacatgcttgctgagatcaacaagacttttcatctacgtaaatacagctacggtgatcttaaatgtgtgttcaaagcctagcatgtggatttctaattattttaactaactgacaagtaagaccatttgtactcataatctacaacatgatgttttaagatacatatacatgttggaatggccaaactgaataaacatatgcctcgtctcaacatgtttaccacctttctgaataagtacacttgaaaaatctcctctcagtaacttctacatgcataatatattaatggtagtcaccgtgttgtataccagatctccagacctcttatttaactgaaactcggtatcctttgtacatctcccccacatcctccgtgccccctttccttaccccaactgctggtaaacaccactccatttcctgtttctaccagttcatttttcattttaggactgtctttccctaggttatttcacttgacacaatgtcaggttcatctgtgttgtcacaactggcggagttttatatatatattttaaagctgggtactgttcccgtgtgtagttagagcacatctgctttatccattcagcttctggtagctattaggttgttaccatgtcttgcccattatgaatttcactgcattgaacatgggtgtagagcccgctctacaaaatgctaatctcactcatttggttctaatccagaagtgggaatgagagaccatatggtagcccgatttctacttttcttagggacttctgcactttggcactgaactattggcagttccactttatatttacatctgtactgtagaaggattctttctcacccttcctttctccacacttgtcagctctgtcttttttctaaaagccgtcctgacaagtgtggcttggctttgcaatttccttaacaactagtgatgttgagcatttcatcgccttgctcttggccttttaaaggtgtctcatcttgagaaatgtttggttttattttctgcccagtcttagcaaagtttacttgctgttgagttctcaagttccttatacattttgaatactaactcatcagatatatgcttagaaaacattgtcttccgacttataggctcacttgccattctgttaattatttcttttgttatgcagagcctttccaatttgatctagttccattttccttccactttgttttctttcctggtctgtccatctatacaaaacttcattgctaagactagtatcaaggcacaagtcccttccgctcgactcgagactcgagccccgggctaccttgccagcagagtcttgcccaacacccgcaagggtccacacgggactccccacgggaccctaagacctctggtgagtggatcacagtgcctgccccaatccaatcgcgcggaacttgagactgcggtacatagggaagcaggctacccgggcctgatctggggcacaagtcccttccgctcgactcgagactcgagccccgggctaccttgacagcagagtcttgcccaacacccgcaagggtccacacgggactccccacgggaccctaagacctctggtgagtggatcacagtgcctgccccaatccaatcgcgcggaactcgagactgcggtacatagggaagcaggctacccgggcctgatctggggcacaagtcccttccgctcgactcgagactcgagccccgggctaccttgacagcagagtcttgcccaacacccgcaagggcccacacgggactccccacgggaccctaagacctctggtgagtggaacacagcgcctaccccaatccaatcgcgtggaacttgagactgcggtacatagggaagcaggctacccgggcttgatctggggcacaaaccccttccactccactcgagccccggctaccttgccagctgagtcgcctgacacccgcaaggggcccacacaggattccacacgtgatcctaagacctctagtgagtggaacacaacttctgccaggagtctggttcgaacaccagatatctgggtacctgccttgcaagaagagagcttgcctgcagagaatactctgcccactgaaactaaggagagtgctaccctccaggtctgctcatagaggctaacagagtcacctgaagaacaagctcttaacagtgacaactaaaacagctagcttcagagattaccagatggcgaaaggcaaacgtaagaatcctactaacagaaatcaagaccactcaccatcatcagaacgcagcactcccaccccacctagtcctgggcaccccaacacaaccgaaaatctagacccagatttaaaaacatttctcatgatgatgatagaggacatcaagaaggactttcataagtcacttaaagatttacaggagagcactgctaaagagttacaggctcttaaagaaaagcaggaaaacacagccaaacaggtgatggaaatgaacaaaaccatactagaactaaaaggggaagtagacacaataaagaaaacccaaagcgaggcaacgctggagatagaaaccctaggaaagagatctggaaccatagatgcgagcatcagcaacagaatacaagaaatggaagagagaatctcaggtgcagaagattccatagagaacatcgacacaacagtcaaagaaaatacaaaatgcaaaaggatcctaactcaaaacatccaggtaatccaggacacaatgagaagaccaaacctacggataataggaattgatgagaatgaagattttcaacttaaagggccagctaatatcttcaacaaaataatagaagaaaacttcccaaacataaaaaaaagagatgcccatgatcatacaagaagcatacagaactccaaatagactggaccagaaaagaaattcctcccgacacataataatcagaacaacaaatgcactaaataaagatagaatattaaaagcagtaagggagaaaggtcaagtaacatataaaggaaggcctatcagaattacaccagacttttcaccagagactatgaaagccagaagagcctggacagatgttatacagacactaagagaacacaaatgccagcccaggctactatacccggccaaactctcaattaccatagatggagaaaccaaagtattccacgacaaaaccaagttcacacaatatctttccacgaatccagcccttcaaaggataataacagaaaagaagcaatacaaggacggaaatcacgccctagaacaaccaagaaagtaatcattcaacaaaccaaaaagaagacagccacaagaacagaatgccaactctaacaacaaaaataaaagggagcaacaattacttttccttaatatctcttaatatcaatggactcaattccccaataaaaagacatagactaacagactggctacacaaacaggacccaacattctgctgcttacaggaaacccatctcagggaaaaagacagacactacctcagagtgaaaggctggaaaacaattttccaagcaaatggactgaagaaacaagctggagtagccattttaatatcggataaattcgacttccaacccaaagttatcaaaaaagacaaggagggacacttcatactcatcaaaggtaaaatcctccaagaggaactctcaattctgaatatctacgcaccaaatgcaagggcagccacattcattagagacactttagtaaagctcaaagcatacattgcacctcacacaataatagtgggagacttcaacacaccactttcttcaaaggacagatcgtggaaacagaaactaaacagggacacagtgaaactaacagaagttatgaaacaaatggacctgacagatatctacagaacattttatcctaaaacaaaaggatataccttcttctcagcacctcacgggaccttctccaaaattgaccatataattggtcacaaaacaggcctcaatagatacaaaaatattgaaattgtcccatgtatcctatcagaccaccatggcctaagactgatcttcaataacaacataaataatggaaagccaacattcacgtggaaactgaataacactcttctcaatgataccttggtcaaggaaggaataaagaaagaaattaaagactttttagagtttaatgaaaatgaagccacaacgtacccaaacctatgggacacaatgaaagcatttctaagagggaaactcatagcgctgagtgcctccaagaagaaacgggagacagcacatactagcagcttgacaacacatctaaaagccctagaaaaaaaggaagcaaattcacccaagaggagtagacggcaggaaataatcaaactcaggggtgaaatcaaccaagtggaaacaagaagaactattcaaagaattaaccaaacgaggagttggttctttgagaaaatcaacaagatagataaacccttagctagactcactaaagggcacagggacaaaatcctaattaacaaaatcagaaatgaaaagggagacataacaacagatcctgaagaaatccaaaacaccatcagatccttctacaaaaggctatactcaacaaaactggaaaacctggacgaaatggacaaatttctggacagataccaggtaccaaagttgaatcaggatcaagttgaccatctaaacagtcccatatcacctaaagaaatagaagcagttattaatagtctcccaaccaaaaaaagcccaggaccagatgggtttagtgcagagttctatcagaccttcaaagaagatctaattccaattctgcacaaactatttcacaaaatagaagtagaaggtactctacccaactcattttatgaagccactattactctgatacctaaaccacagaaagatccaacaaagatagagaacttcagaccaatttctcttatgaatatcgatgcaaaaatcctcaataaaattctcgctaaccgaatccaagaacacattaaagcaatcatccatcctgaccaagtaggttttattccagggatgcagggatggtttaatatacgaaaatccatcaatgtaatccattatataaacaaactcaaagacaaaaaccacatgatcatctcgttagatgcagaaaaagcatttgacaagatccaacacccattcatgataaaagttttggaaagatcaggaattcaaggcccatacctaaacatgataaaagcaatctacagcaaaccagtagccaacatcaaagtaaatggagagaagctggaagcaatcccactaaaatcagggactagacaaggctgcccactttctccctaccttttcaacatagtacttgaagtattagccagagcaattcgacaacaaaaggagatcaaggggatacaaattggaaaagaggaagtcaaaatatcactttttgcagatgatatgatagtatatataagtgaccctaaaaattctaccagagaactcctaaacctgataaacagcttcggtgaagtagctggatataaaataaactcaaacaagtcaacggcctttctctatacaaagaataaacaggctgagaaagaaattagggaaacaacacccttctcaatagtcacaaataatataaaatatcttggcgtgactctaactaaggaggtgaaagatctgtatgataaaaacttcaaatctctgaagaaagaaattaaagaagatctcagaagatggaaagatctcccatgctcatggattggcaggatcaacattgtaaaaatggctatcttgccaaaagcaatctacagattcaatgcaatccccatcaaaattccaactcaattcttcaacgaattggaaggagcaatttgcaaatttgtctggaataacaaaaaacctaggatagcaaaaagttttctcaaggataaaagaacttctggtggaatcaccatgccagacctaaagctttactacagagcaattgtgataaaaactgcatggtactggtatagagacagacaagtagaccaatggaatagaattgaagatccagaaatgaacccacacacctatggtcacttgatcttcgacaagggagctaaaaccacccagtggaagaaagacagcattttcaacaattggtgctggcacaactggttgttatcgtgtagaagaatgcgaatcgatccatacttatctccttgtactaaggtcaaatctaagtggatcaaggaacttcacataaaaccagagacactgaaacttatagaggagaaagtggggaaaagccttgaagatatgggcacaggggaaaaattcctgaacagaacagcaatggcttgtgctgtaagatcgagaatcgacaaatgggacctaatgaaactccaaagtttctgcaaggcaaaagacaccgtcaataagacaaaaagaccaccaacagattgggaaaggatctttacctatcctaaatcagataggggactaatatccaacatatataaagaactcaagaaggtggacttcagaaaatcaaataaccccattaaaaaatggggctcagaactgaacaaagaattctcacctgaggaataccgaatggcagagaagcacttgaaaaaatgttcaacatccttaatcatcagggaaatgcaaatcaaaacaaccctgagattccacctcacaccagtcagaatggctaagatcaaaaattcaggtgacagcagatgctggcgaggatgtggagaaagaggaacactcctccattgttggtgggagtgcaggcttgtacaaccactctggaaatcagtctggcggttcctcagaaaactggacatagtactaccggaggatccagcaatacctctcctgggcatatatccagaagatgccccaacaggtaagaaggacacatgctccactatgttcatagcagccttatttataatagccagaagctggaaagaacctagatgcccctcaacagaggaatggatacagaaaatgtggtacatctacacaatggagtactactcagctattaaaaagaatgaatttatgaaattcctagccaaatggatggacctggagggcatcatcctgagtgaggtaacacattcacaaagaaactcacacaatatatattcactgataagtggatattagccccaaacctaggatacccaagatataagatataatttgctaaacacatgaaactcaaggagaatgaagactgaagtgtggacactatgcccctccttagatttgggaacaaaacacccatggaaggagttacagagacggagtttggagctgagatgaaaggatggaccatgtagagactgccatagccagggatccaccccataatcagcatccaaacgctgacaccattgcatacacttgcaagattttattgaaaggacgcagatgtagctgtctcttgtgagactatgccggggcccagcaaacacagaagtggatgctcacagtcagctaatggatggatcatagggctcccaatggaggagctagagaaagtagccaaggagctaaagggatctgcaaccctataggtggaacaacattatgagctaaccagtaccccggagctcttgactctagctgcatatatatcaaaagatggcctagtcggccatcactggaaagagaggcccattggacttgcaaactttatatgccccagtacaggggaataccagggccaaaaagggggagtgggtgggcaggggagtgggggtgggtggatatgggggacttttggtatagcattggaaatgtaaatgagttaaatacctaataaaaaatggaaaaaaaaaaaagactagtatcaagaagctttctaggatcccccccccagggggtgtgttgaaagcctaagccatggatatttattcactttgaattggattttgtatttgataaagagaaagacattttattctcttcgaatatggagattcagttttcccaaaaaatatttgcaaatactatctgtgtactaaagaaaagtttgtctatatcttatattaccataaagatgtggtaacaacattagatatatgtcagaaatctgtgtggatatcctcaaatttaaataaatgagaggaaggaaatagcaaagagttaaggagataaacagaagataggcattagcagttaataagtcatggagcattagatatgtaaggtaggaaaagaactggatttgggccgtgtctcccctttacctgtctttctctttctgcttaacacagaccttagtctataatatctgttagacattctttaataaatattttgtttttctccttgtccaaaatatatttctttttaaaaaccattttctttgtttttatttcatatggatgtgtgcgtgccgccaggtatgtatgtgccccacaagcatgcttggtgcactcagaggccagaaaaagggtgttggatcctctggaactgagttaaaggggtttgtgaatcatgaagtcggtgcagagaactgagtctgcaggttctcttaactactgaaccatctcaccaggcccccaaacgtctttctttatcaaaatactttaacttcaccttggttaagatttgcttggaataacttaaattttagttaaaatatttagtcaggctggagagatggctcagtaggtaaaagtgctttttatacaaacatgaaggcctgagtatgaatccccagaaagccagacacttagagcaagtgtctgcaatcttagtattcctatggggaaatagaaggcagaaacagggcaatccccagaagttcacaggctggataaatggtgtacagagtggagaaatgacagagagcctgtctcagacaaggtggaagacaaagaccaatgtctgaggttgtcctctgacttgcatacatgtgctctggcaagcatgcacctatatttacatacatgaatgcacacacacacacacataaattaatcaatcaaccagtcaaaggcaaccagaggtcctgtgtgctagctcaatgacaaagtgcttgcttagtatgcataaaaactttactcaattccagttctggaaaaccattaattaattagttaattaattaagtaagtaagtaagtaagataaaatgtgaaatcacctcatgttgtgaacaaccttcacctttggtttggacggatgggaaagggcatgcatgcagacaatgggtgtgacataatggggacattttaaagcacagacatttaggaacaaattgtttgtgaatgaaggaatagatcagggtggtatgaggacccaggggatcagggaaggccccagagaaatgtacaaacgttcttgggagaggggaagactagagtatgtaaaccgcattgttaagaatttttacctataaaaagtgtacactcagggacatgagaagaaaatgctcctcttcccacaaagtctaaggctgccttagaagcaattcaagctggccaggtttctactgtatacgtaggtaagatgggctttaggaggcttccccaaatactcacctactttgcacatcagtacacatacacactcacacacacacacacacacacacacacacacatatatgaaatcccacacaaatttttcaattctaaccagttcagatattaagtatagctgataatatatttggtttgcatattaatttagaaatgcaagtagattgtacttgtgaagagaaatgtcaagatgctagagacactgggaaacacataaaagatgatttgagggacagggcaattgaaagaaacatcacatggccatctttaaacaaactactaaatgatgaccacattttcagaacctcatagcagacatgtggttttatatgttagaccacaataagtttacccatgctaaagaatcaatggtgtgagacattatatgaaaaggattactccagctgtgccaagatagaagcaagattggagacgtgataaaatgtgggtggtttaggtatgctagtcaccaatgctaaaactaagctcatgctggaaaaggaagtgccagctgctattggtgcacacagcaactagatttaatccaaccaaaagttgacacaaagtttcttcatggacacgtagggaggagaaagggttgtgaacagatgtgcagtgagggctctgcaggtgtgccacttacctgtgaagtggtcctattggaggaaaataagatagatgatatattctctcgtgaggtgtattcaaaaacctgggatgcagggggaacatagaaatacgactgaagaacaacggtgtagagagctgagaatgggagctcctatatccagcacatatgtcaccatgaaggttctgctctcaaaactaaacatggtcagttgttttctcatttgaggaattcctctctgttggcctgagaccccactggaagatgactgccttataccctttctctttgctatatcaaacgtggtccttgtaaattgttattaaaattttaataataagtcatggatttggggatggagaagaatttgcatcgcttcttttgtgggcgtctgactgaaatttgggcttcttttgattacaaatgtgaacagcaaatctgttacacaaagaacatttagcaatgctgttatcagtaggaactgcagacatttctctattctgttattgttgtggttagtttgaaataaagattactacattacttcttagatactgtgttttgcttcattgtttgttttgttttgtttttttatgtatatgtgtgtgttgtgtgcaggtttgtatccatgtgggtgcatatgttagggggcagtagggcagtgtagatgtggaagtgaggggtgggagatctccctatgcccatggtaccactccgtgggcaggaggcagggccacgtctcctgcacctatgccaccagagcagccctgtgccacccaggagagatgcaggcccccctctcctgggtatagcagccaccgagggaaggaaccacccacccactcttccacccttggggtcagttctcccatgctgcccaggccggaggccagctttttaacctttgtagttttcagtatcttagtctaaaagatatagattttcatggttcctacttcatattatcatgggaacaattaaataagaaaatgcatataacattattatctctgaatctaggtcattaaagcttctgatgagaattaactattacttattacgatggagagaaaaataaaaaaatatgtataaattggttttgggtttcaaaataggttgaggaggaaaaactttaaattattctaagttcctttatgtatgatttatggaaataaactatctctagggggtgtgtatatatatcttggtggtagaacacttgtctagtacatgcaaaaccctgcatttggtttttaatattggtagaaatgaatatgagccattcttaaatcaggagtacctggtcacttgtgagttgatcaagatatttgactttttttctaaagaaaagaagatgaaataataacttggcttttcttacaaaaaacacactcagggactctatatccttgccagttgtctgctatgtagtttattgagacttcccagcactgtctggaatttccaaggcttggatgtataaaaataattcactagaactgactccaaatacgtttttatttcggcctgaagtagaagatggatgtgctaggaattaaatggatcagcagaagtcaggcagaaagctgatgttatcctgagtagcagcccttgctgacagaaacttagtacctaccacgaggggggcaagtttactgcaacttggagggcagcaaagaggggtgtatacaaactcctgattcaaaacaacaacaacaccaaaaaaaaaaaaaacaaaaaaacaaaaataaaacaaaacccactaaggttctgacattccaatgtgaatcctcttctggagggcccaggttcaattcccaacacccacatggcagctcaatctgtctacagctccaacactggagcatctggtaccttcacaaacatacatgcagcaaaatgccaacacacatcaaggaccattgagaagaaaaggggtggatgatggccttgttggacatcagtgggaggagaggccctgggacctgagggtgttcagtgccccagagtagtggaatgccagggcaagaggatgggagtgggtagatgagggagcaccctcatagaggcagggggaggagggatgggatgggggcttcagaaggggagacctggaaaggggaaaacatttgaaatgtaaataaagaaaatatccaagaaaattaataataataataataataataataataataaagaaaagggagtggtgggaaatagctttcaaagatactgttcctccgcctgcttgctatctgaggcccatgcagaatagagcgtgctcactgttcccctagtttcttggccaagagaccatagtacagtgatcctctgcttaaccttttttaaaaggccattcattacttttaacaataggttcaatattttatttacttcaaggattgagttcaaggctatcacattaaaatatattgttttttttttttcattttttattaggtatttagctcatttacatttccaatgctataccaaaagtcccccttacccacccacccccactcccctacccacccactccccccctttggccctggcgttcccctgtaccggggcacacgaagtctgcgtgtccaatgggcctctctttccagtgatggccgactaggccatcttttgatacatatgcagctagagtcaagagctcaggggtactggttagttcataatgttgttccacctatagggttgaagatccctttagctccttgggtactttctctagctcctccattgggagccctgtgatccatccattagctgactgtgagcatccacttctgtgtttgctaggccccggcatagtctcacaagagacagctacatctgggtcctttcagtaaaatcttgctagtgtatgcaatggtgtcagcatttggaagctgattatggggtggatccctggatatggcagtctctacatggtccattctttcatctcagctccatactttgtttctgtaactccttccatgggtgttttgttcccacttctaaggaggggcatagtgtccacacttcagtcttcatttttcttgagtttcatgtgtttaggaaattgtatcttatatcgtgggtatcctaggttttgggctagtatccacttatcagtgagtacatattgtgtgagttcctttgtgattgtgttacctcactcaggatgatgctctccaggtccatccatttggctaggaatttcataaattcattctttttaatagctgagtagtactccattgtgtagatgtaccacattttctgtatccattcctctgttgaggggcatctgggttctttccagtttctggctattataaataaggctgctatgaacatagtggagcatgtgtccttcttaccagttggggcttcttctggatatatgcccaggagaggtattgctggatcctccggtagtactatgtccaattttctgaggaaccgccagactgatttccagagtggttgtacaagcctgcaatcccaccaacaatggaggagtgttcctctttctccacatcctcgccagcatctgctgtcacctgaatttttgatcttagccattctcactggtgtgaggtggaatctcagggttgttttgatttgcatttccctgatgattaaggatgttgaacattttttcaggtgcttctctgccattcggtattcctcaggtgagaattctttgttcagttctgagccccattttttaagggggttatttgattttctgaggtccaccttcttgagttctttatatatgttggatattagtcccctatctgatttaggataggtaaagatcctttcccagtctgttggtggtctttttgtcttatagacagtgtcttttgccttgcagaaactttggagtttcattaggtcccatttgtcaattctcgatcttacagcacaagccattgctgttctgttcaggaatttttcccctgtgcccatatcttcaaggcttttccccactttctcctctataagtttgagtgtctctggttttatgtgaagttccttgatccacttagatttgaccttagtacaaggagataagtatggatcgattcgcattcttctacatgataacaaccagttgtgccagcaccaattgttgaaaatgctgtctttcttccactggatggttttggctcccttgtcgaagatcaagtgaccataggtgtgtgggttcatttctgggtcttcaattctattccattggtccacttgtctgtctctataccagtaccatgcagtttttatcacaattgctctgtagtaaagctttaggtcaggcatggtgattccaccagaggttcttttatccttgagaagagtttttgctatcctcggttttttgttattccagatgaatttgcaaattgctccttctaattccttgaagaattgagttggaattttaatggggattgcattgaatctgtagattgcttttggcaagatagccatttttacaatgttggtcctgccaatccatgagcatgggagatctttccatcttctgagatcttctttaatttctttcttcagggacttgaagtttttatcatacagatctttcacttccttcgttagagtcacgccgagatattttatattatttgtggctattgagaagggtgttgtttccctaatttctttctcagcctgtttattctttgtgtagagaaaggccattgacttgtttgagttaattttatatccagctacttcaccgaagctgtttatcaggtttaggagttctctggtggaatttttagggtcacttatatatactatcatatcatctgcaaaaagtgatattttgacttcctcttttccaatttgtatccccttgatctccttttgttgtcgaattgctctggctaatacttcaagtactatgttgaaaaggtagggagaaagtgggcagccttgtctagtccctgattttagtgggattgcttccagcttctctccatttactttgatgttggctactggtttgctgtagattgcttttatcatgtttaggtattggccttgaattcctgatctttccagaacttttatcatgaatgggtgttggatcttgtcaaatgctttttctgcatctaacgagatgatcatgtggtttttgtctttgagtttgtttatataatggattacattgatggattttcgtatattaaaccatccctgcatccctggaataaaacctacttggtcaggatggatgattgctttaatgtgttcttggattcggttagcgagaattttattaagaatttttgcatcgatgttcataagagaaattggtctgaagttctctatctttgttggatctttctgtggtttaggtatcagagtaatagtggcttcataaaatgagttgggtagaataccttctacttctatcttgtgaaaaagtttgtgcagaactggagttagatcttctttgaaggtctgatagaactctgcactaaaccggtctggtcctgggctttttttggctgggagactattaataactgcttctatttctttaggggatatgggactgtttagaaggtcaacttgatcctgattcaactttggtacctggtatctgtccagaaatttgtccatttcgtccaggttttccagttttgttgagtatagccttttgtagaagaatctgatagtgttttggatttcttcaggatctgttgttatgtctcccttttcatttctgattttgttaattaggattttgtccctgtgccctttagtgagtctagctaagggtttatctatcttgttgattttctcaaagaaccaactcctcgtttggttaattctttgaatagttcttcttgtttccacttggttgatttcacccctgagtttgattatttcctgccgtctactcctcttgggtgaatttgcttcctttttttctagagcttttagatgtgttgtcaagctgctagtatgtgctctctcccgttttttcttgaaggcactcatagctatgagtttccctcttagaaatgctttcattgtgtcccaaaggtttgggtacgttgtggcttcattttcattaaactctaaaaagtctttaatatctttctttattccttccttgaccaaggtatcattgagaagagtgttgttcagtttccatgtgaatgttggctttctgttatttattttgttattgaagatcagccttagtgcatggtgatctgataggatacatgggacaatttcaatatttttgaatctgttgaggcctgatttgtgacctattatgtggtcaattttggagaaggtaccatgaggtgctgagaagaaggtatatccttttgttttaggataaaatgttctgtagatatctgtcagatccatttgtttcatcacttctgttagtttcagtgtgtccctgtttagtttctgtttccatgatctgtccattggtgaaagtggtgtgttgaagtctcccactattattgtgtgaggcgcaatgtgtgctttgagctttactaaagtttctttagtgaatgtggctgctcttgtatttggagcatagatattcagaattgagagttcctcttggaggattttacctttgatgagaatgaagtgtccctccttgtcttttttgatgactttgggttggaagtcaatcttatcagatattaggatggctactcctgcttgtttcttcataccatttgcttggaaaattgttttccagcctttcattctgaggtagtgtctatctttttctctgagatgagtttcctgtaagcagcaaaatgttgggtcttgtttgtgtagccagtttgttagtctatgtctttttattggcgagttgagaccattgatgttaagagatattaaggaaaagtaattgttgcttcctgttattttagttgttaaaggtggcattctgttcttgtggctgtcttcttttaggtttgttgagggattaccttcttgttttttctagggcgttgttcccgttcttgtattggtttttttctgttattatcctttgaagggctggattcgtggagagataatgcgtgaatttggttttgtcgtggaatactttggtttctccctctatgataattgagagtttggctgggtatagtagcctgggctgcagtttgtgttctcttagtgtctgtataacatctgtccaggctcttctggctttcatagtctctggtgaaaaatctggtgtaattctgataggcttgcctttatatgttacttgacctttttcccttactgcttttagtattctatctttatttagtgcatttgatgttctgattattatgtgtcgggaggaatttcttttctggtccagtctatttggagttctgtaggcttcttgtatgttcatatgcatctcattctttagatttgggaagttttcttcaacaattttgttgaagatgtttgctggacctttgagttgaaaatcttcattctcatccactcctattatccgtacgtttggtcttcttattgtgtcctggatttcctggatattttgagttaggatctttttgcattttccattttctttgattgttgtgccgatgttctctatggaatcttctgcacctgagattctctcttccatctcttgtattctgttgctgatgctcaaatctatggttccagatttctttcctagggtttctatctctagtgttgcctcgctttgagttttctttattgtgtctacttccctttttaggtctagtatggttttgttcatttccatcacctgtttgtatgttttttcctctttttctgtaaggacttctacctgtttgattgtgttttcctgtttttctttaaggacttgtaactctttagcagtgttctcctgtatttctttaagtgatttattaaagtccttcttgatgtcctctaccatcatcatgagatatgcttttaaatctaggtctaggttctcaggtgtgttggggttccctggactgggcgaagtgggtgtgctgggttctggtgatggtgagtggtcttggttcctgttagtaagattcctccgtttacctttcgccatctggtaatctctggagttagtagttatagttgactctgtttagagattgttcttctggtgattctgttaccgtctatcagcagacctgggagacagattctctcctctgagtttcagtgctcagagcactctctgctggcaagctctcttacagggaaggtgcgcagatatcttgtatttggacctcctcctggccgaagaagaaggcccaaaacaggacctttctcagacactgtgttgctttggcagtccccaggtggtacagactctcacctaagcagactaaattcctaagttccttggagtcccgggaccaagatggcgaccgctgctgctgtggcttaggccgcctccccagccgggtgggcacctgtcctccggtccggaaggtggccggctgtccccggcccacaaagggtgctgcctcagcgcctcagcgcctctgtgcttctgcctgttccagacgctgtcaggttctctggcgcaccctctcacctgttcagactaatttcctaagttcggcgggtctcggaccaagatggcgaccgctgctgctgtggcttaggtcgcctccccagccgggcgggcacctgtcctccggtccggaaggtggccggctgtccccggcccacaaagggtgctgcctcagcgcctctgtgcttctgcctgttccagacgctgtcaggttctctggcgcaccctctcacctgttcagactaatttcctaagttcggcgggtctcggaccaagatggcgaccgatgctgctgtggcttaggccgcctccccagccgggcgggcacctgtcctccggtccggacggtggctggctgtccccggcccacaaagggtgctgcctcagcgcctctgtgctcccgcctgttccagaagctgtcaggttctctggcgcaccctctcacctgttcagactaatttcctaagttcggcgggtctcggaccaagatggcgaccgctgctgctgtggcttaggtcgcctccccagccgggcgggaacctgtcctccggtccggaaggtggccggctgtccccggcccacaaagggtgctgcctcagcgcctctgtgcttctgcctgttccagaagctgtcaggttctctggcgcaccctctcacctgttcagactaatttcctaagttcggcgggtctcggaccaagatggcgaccgctgctgctgtggcttaggtcgcctccccagccgggcgggcacctgtcctccggtccggaaggtggccggctgtccccggcccacaaagggtgctgcctcagcgcctctgtgcttctgcctgttccagacgctctcaggttctctggcgcaccctctcacctgttcagactaatttcctaagttcggcgggtctcggaccaagatggcgaccgctgctgctgtggcttaggccgcctccccagccgggcgggcacctgtcctccggtccggacggtggctggctgtccccggcccacaaagggtgctgcctcagcgcctctgtgcttctgcctgttccagaagctgtcaggttctctggcgcaccctctcacctgttcagactaatttcctaagttcggcgggtctcggaccaagatggcgaccgatgctgctgtggcttaggccgcctccccagccgggcgggcacctgtcctccggtccagacggtggctggctgtccccggcccacaaagggtgctgcctcagcgcctctgtgcttctgcctgttccagaagctgtcaggttctctggcgcaccctctcacctgttcagactaatttcctaagttcggcgggtctcggaccaagatggcgaccgctgctgctgtggcttaggtcgcctccccagccgggcgggcacctcaaaatatattgttttaaaagcctgaagtttatggggtggatccctggataaggcagtctctacatggtccctcctttcatctcagctccaaactttgtctctgtaactccttccaagggtgttttgttcccacttctaaggaggggcatagtgtccacacttcagtcttcatttttcttgagtttcatgtgtttaggaaattgtatcttatatcttgggtatcctaggttttgggctaatatccacttatcagtgagtacatattgtgtgagttcctttgtgaatgtgttacctcactcaggatgatgccctccaggtccatccatttggctaggaatttcataaattcattctttttaatagctgagtagtactccattgtgtagatgtaccacattttctgtatccattcctctgttgaggggcatctgggttctttccagcttctggctataataaataaggctgctatgaacatagtggagcatgtgtccttaccccataatcagaatccaaacgctgacaccattgcatacactagcaagatttttatcgaaaggacccagatgtagctgtctcttgtgagactatgccggggcctagcaaacacagaagtggatgcccacagtaatggatggattacagggctcccaatggaggagctagagaaagtacccaaggagctaaagggatctgcaaccctataggtggatcaacattatgaactaaccagtaccccggagctcttgactctagctgcatatgtatcaaaagatggcctagtcggccatcactgcaaagagaggcccattggacacacaaactttatatgccccagaataggggaacgccagggccaaaaagggggagtgggcgggtaggggagtgggggtgggtgggtatgggggacttttggtatagcattggaaatgtaaatgagctaaatacctaataaaaaatggaaagaaaaaaaaataaataaagccaaaaaaaaaaaaaaagcctgaagtttttactttagatcttgacacaggaagtgaattctccttgaatcatgactaggaagtatgttattcttcttttctgtctttcccagtgaattatgggaaaaatgtaagcatcatcaaaaatcatgagatgataaatgtgaattaaattcacttgaccagtgattttttcccactgtgtgaaaccagattttctaagtttaatgctatccctcagaaaaggactttacaagatgtaaaagtgctctgagcttttgaaagcaccaacagctgtctaggcggagatgaacctaaaccttctaaacgctctacccatttacattacttcatcaaaatgacgagttctctggtttcactttgattattttgtaactgagaggactgtaggaagaaagggttttcactgctgtgttttttgtgacgatcaagattgtcagtaggcaatgagtttccgctgtagcacacaggacaaataaatgaacactttgctgatagggttttccttttatgacagtgagatatttccaggtaatgcacccgtttgctacctctttgtataaaattgtagcattgcataactcattagacctacctgtgaaagctggagtgtttggagaagcaggaagtggacttgcatggatcagtaaaacaatcaggaaatgtttcaggtttccttctgcagaattcacagtcccaggagtccccatgtaagtctccattttgcagacctgtctacagtttttctcctggggtgatggtgatggaaagctaacctgtacaggaattgacccatcacccagtttgtgaccctatggttgtgccttggaaggaactatgtatatacatctgagtttgtttgtttaattgtttgtttgtctgtctttcagagaaactttgatgacaatatactatttcttttagtggtgtgccatcctctattcacattcccttttctggatatctccctcccttccttcccaccccctcctcctttgtttggcttctctatcaagaatgagcagtgtttgttttgctcatgtttgcagtagcaggggaagaatttaagaattgtttcaaaggataggaggactgcaaattgcaggcaactaaacaatactcagttggctaattcggggggaatgctttcaagtgttaaacacacaggaaagatctacaagaaacgtcaggaaaactatacccattatatctggagactgaatatattctaaatactttttaatctaatgaaagaaaactaataattatagtcttttcctttcttccaagtagacattctaaaagcaagcatataaacacaatctctactctgctatccacagaactacaatgagaacacaaattcaatgaactccacattttttgaatggttcagaaagcttaaagtccaatgagtaatctcatgaatgcaaactgtctatgtaaacaatgttggataaggacattttttgttatctatcacatcataagaatttgccccaaatgaagagattttaaaataagaactacttcattgcatttacatatgtactacgaaagagatcaggattgttctcacagtataaacagaaatctcttagagccattcatgtgacaagtagccttggctggagaccccgagatggcttcatttacacatatgcagccttggtgacactcatctgaatgtcagtctctggtggcacttgggagctcctctgtggcttctctgcacagcagtctctaggtagttacactaacagaacagaaccaaactcccagaagaaattccccacggattctcagagatgcagcaaggcttcttagcaaaagtcaagatcccagaacttcacttctacagcattctgtggccagccagaagtaaggccgatcctaattcacagagagatggatttgtgtccatctaacacagagagcccctcccaatggcacttaccacactgtcttacttctctacatagaggagtaaagaacaaaaacagagagagacgtctgatccataagtaagagaaaatgccactagatctcaacaggccaatgacttcataagccacggcttcaagtcagctatgttaagtcttgtatactataataaaataaagaatgatagagagagagagagagagagagagagagagagagagaggaaagtccaaagaagactcaagtgaactagctgaggttagtaatatataaaataaaaacatggataagattaagagaattaaacattacaggaaaaaaaatgaatcaaaagatagaaagttagtaactgacagccatataaaactaaatataaaaaggggaaagtttgaaaagccgaataacaggggccaacccagcggcagctcaaagcacttgctacatgcctcactaggtgaggtcagccctgggttccacacaaggaaagagagaaacaactatggcaggttgtcctgtgacttccatatgcctgttgtgatatgcacatgcatgtatataattttaaaaatgttttaatgtgtcagtatacattctagctcaaagcaggatgaggggctcatgagttccatgcttcaactagggaactataggtcattgatagtgtctgaggagggagagtctacttttgtctgtgggtttgactactggtcggtaaacctggctctagtggaaggccctgcatacatgagtatgtgggcggcacaaggtggactctctgggttatttttttttttttctgaagcacatcaagttggggatttatgtgggatgctagagagataaggatgaatctaggaggagctagagaactggagggcagaaatgatcacaacacattggaattttcaaagatctacttacttaaaaatgaccagatctttttgtttggttagttgattggttttgttttgttttgctttgctttgctttgctttgctttgctttgctttgctttgctttgctttgctttgctttgctttgctttgttttgttttgttttgttttgttttgaagatggggtttctctgggtaactgctctggttgtcctggaactctgtaaatcacgctggcctcgaactcagagatctgcctgcttctgccttcctagtgctgggattaaatgctgtgctggctccacataactagagcttaagaagagtagaacaaaccagaattttttaaaaaagaaaagcttagagtaatcacaattcaaaaatttcaaaatctggaaattctaaattcacaaatttaaaatttttataaaatatggaaagaataaatatgaagaaaactgtaatagagtatatttgactgatttgctataagtcagtataaagtaatgtcaatagtagccaggagtcactatatattcccattgtctatgaagagtaagaacatatacactgtcaaaacccacatgaactaaaatgtagagtttaaagcattaaaagaaattaagactgcctttctagactgttgtgtgcacagtgaagatatctctccatattgaagctgaaaagagattctttcaaatgagcaaaaactgagcaaagtcactgccagcagatttgtgtttaaaaagaaaaagagaaacagaagaaggaagggaatggagggagaatcaaaccacattaaaggacgttcttctgccagaaagaaaacagaaacttgaattggcttgcatgaccgaagagcaataggaaatgtgggtaagatgaacatggggtttgagatcaacgctaaacaattaagtggcaagcacagaaatgcaattaatttatgcagacatgctaactcttgagatgcagatcaagaatgagaacactcttctttgccattaacatctttttataacctcttgaaatcttttttaagtttatttttttatctaacgtatgagtgctctgctacatggacacctgtagacagaagagggcatcagatccctttataggtgattgtgagccaccaccatgtgggtgatgggaattgaagtcagaaccgctggaagagcagccagtgttcataactgcttagccatctctccacctcccttctttaccacttttaaataaaattatttttcttttcccaaataaaaatagtggcaacaaccagcaacaacaaccacgcagactctgtatctctctctctctctctctctctctctctctctctctctctctctctcaccctcttcctcaactgcttgcctctgtgtaacacgtataaatgataaatacattcatggtttctcttgagtgtctagctctctgtgctgatggtttgaaaggtcctaaagccaagtcctttcctccctgggtataattagcatgtaatgccttcaaattttaacaagaggtgacaaactttcaaactgccataaggcacatgaataccaggagggtgggcggtcaggcagaggctatgccaaagccaacactgccatttgtctaagagagagcagaatgtcagctgtatttataaacattgctgttgttatgaagactcaatctaggaccttgtgagggctagacaagtgctcacaaactattaaactacatcttcagccaatggttttcttttgagaaaggaagttgtaatttagttcaggctagcccatgtaggtgagactgaccttgaactttcaatcctcttgcctctgctgtctgagtctgagattacgggcatgtgcctgtgtgcccaaatagatattgtttgagataagattcccatgcattataatcactcgaggttttgtacagtttaactcactttcatgtctactttgccatctcagaatatctgaggaggggaaagaacattacagtccctcggttgatttcaacttagaaagtcttggcctctaactcatgacactgctctcttcaccacttctggatctttcagaccctgtcaatcaacagaagccttcagatcttacccgaaatcaattccttggaaaagatttattctttcatggaatttttttatgcaatatatttgatcatgtttcccctcccccaattcctccaagatcctacccacccaacattatgttctttttctctttcttttcaaaacacacagagtgagagagagggagagagggagagagagagaaaacaaagcaaaatgaaacaaaagagcccacagaaaatccaaactacttctaagtatagggaatggcccaaagtgtggttgatacactaagagtcttgccattgagaaagttgattttccttttgtcagtgggtatcagctgcaaacagcttcttggttagtgccacaggctctgtaagttaatatgtgaatcagtcctgttgtctggaagatactgtttccttggggctctccatcacctctctccttcacaatctttctgcctcctctttcacataccctgcaccttgaggggagagtttggtgaaggcatcccattgaggactgagtgctccaaagtctctccctctccacacatggttcagctgtagatctctgttaattccccactaccactaggagaagattctctgatgtgggttgagcaaggcacagttcaatgggtactggcggtatattgctatgaattataatattaagttttcccctaagcccaagacctatccagtctcaggttcttagccactttaatggtctcaggtgtggattctatctcgtggagtagaccttacatccattttgaaggcagttggttactctcataacattgtgccgctattgtagcagactatcttgcaggcaggtcactgtaatgggttgcagaatttgtgatattgatttgtgatttgtgtaatgggttgcagatttgtgattctcttccaatagtatacagaatcctatccaatatcatgaattggaatcagtatgagaagagcttctagtaggtgtcagtgtggcttcttccttggagaaggtttatacctcataggtctgtactcttgttcaaagaagtggcacagcgataactctatagttacaattatgtcttactaattataatacacattttcttcttaaaatttttataatccttataaatatttagtcggggcatagctttccagcaggggcttcagctggtggcccgtggtctggcaggtggctgggccgctgtcctcttctcgatggtggcagtagggaagccgcgaggtagcggggatgcagactggcgcaccaccgagccactggcctggacaagagcgtgaccccggaacagtgtctgggactctaactgggacaggagagaaccactgtcactcattaacctgaagaaaaggaacgtggaatctggagaaggtgaactggcatgcaggctggaccactataaggcaagggctacaaggcacatacgtattcctcatccagcattcacagtaccatgtggatagctcactggaaaaggatcgcaccctgaccccattaggtcgggaacagactgaactcacggggctcctccgacttgcaagcctgggattaaagtttaataaaattgtccattcctctatgacccgtgcagtagagaccacagacatcagtcagcacctgccaggtgtcttgagagtcagtacagacttgcttgctacgggaagatgcccccattgaaccggatccacctgtctctcactgcaagccagaggctgtgtattacgaagatggagcctggattgagactgccttcaagaactacctccaccaagctgatgccaagcaggagcttggctccgcctgtccctcaacaatggcattatcaccctcctgctgattcgacccaatggtcttgttgcactcagtacccttggggacacagggttcatgcccccagacaagattactcggtcctgaggctgcctgtttgactgcaccctgtcctctgctggtggcccggctacaaccttccctcatcttccacagctgtgttgtggcttcatgctgttgccagaagaggatatctcaaatgtcacattggggtgcttatttctgactcaggctgaagtaggcaacttaggagttaaatggcctttttgaaagctttctgctttacagttaccaccagcacagtcctgtgaggtgtgacaggagccttcctaggcagaaggcaggcttgtcatggacattgtactagcctggctgtactgtattacatgattacagtagatgaacagagcaatcataacctctgacagagacctgtcaggtagtatggtggttgtttaccggggattatttcatacactgcaatctaggaactttgattgcttatttatcaaagattttcctcatgtgggttcttgctttaaaacccaacttctcaactcagttaagagatcctgtgtctatatctgggtcctttccgcaaaatcttgctagtgtatgcaatggtgtcagcgtttggaggctgattatgggatggatccccgggtatggcagtctctagatggtccatcctttcatctcagctccaaactttgtctctgtaactccttccatggatgttttgttcccaattctaagaaggggcaaagtagccacactttggtcttcgttcttcttgagtttcatagctgtctcttgtgaggctatgctgtggactagcaaacacagaagtggatactcacagtcagctattggatggatcacagggcccctaatggaggagctagagaaagtacccaaggagctaaagaggtctgcaaccctataggtggaacaacaatatgaactaaccagtacccccagagctagtgtctctagctgcatatgtagcagaagatggtctagtcggccatcattggaaagagaggcccattggtcttgcaaactttatatgcctcggtacaggggaacaccagggccaagaagtgaggggaggggggcagagggtatgacaaaagccatgaaagaagtggcactgcaaaaagactgtggcctgtatgaggcaagtaggtgacagtcctgtaagaggttctttgaaggcaaagatacagcccccactgactgaccagaggaggtggtggtggcatatgtttggaattctagcatttgtgtgtgtgtggggggggggggggtgacagaagcgggatcctaagtttctagccagcctgagttatgttgaaagacccagaaaattatccctgacagtgcctgccatcttagtctgctactggctactgttaacttcggacttgtaggctatttagaaatgacgtcttcattccaggtattctgataacttaagaaaaaaactggcttttgtgtatgtggtctttgtttttgctttttgagacagaatcttaactgtcacccaggctggctttgtaaaaccccccgaagctgggcctccgctcaagtcctgggatgagctggccagcaccccaatgacccgagagaaaaccacacctgatgcaaactgcaagagattttattatcagctagctgaggacgaactcctcgcactgtgcagtaactgttactcctcgcactgagctgtaacagtagggggcttttaacagctagctgaggaattgggaggagttgggaggagagttgagaggagttgggaagagttgggaggagttgggaggggttgggaggggttgggaggagttgggaggagttgggaggagttggcaggagagctcttctctgccgggatgtccttggtaaaattacaatgatcgctgtaaggctcaaaaacaaaaaggctttttgctggctatagagaacaaagagcttctttctggctgtatttttagagatcagggaaaacaagcttggggaacgtccagggactttaccttccagggagaaatgctctaagtcggggtctcacagcttcaaatttgagacttttctcagtcttgtaaatgttgggattgcaggtatatactaccatacctgaaccccccacacacacaaaaaaaccaccccagtaagtttctgtgaagtggttgtgagcatcttctgtaaccaatgcaatgaactggaatatttgatatctctctgacctttttggaaataagtatgtaataaaagtattttacttaaaaaaaatattttgttggtaagtattctagaagaccccattcctagtttacgaaggaccagacccaaggagcatgaggccaaagaaacagaaatagagattaaagagtgcacttgtctgggagaattagtaattgaagttcggtcctgtatggcagcaagaccacttaaacctccataacttggattagaaatatggacatgtttgtgggttaggacaaaagggatttccttcttgttagactatacctgggttatcataagataatatcttagacttgggtatatccccagagacagagtgggatgctttgaaattagaattacccacataggctcatatatttgagtgtttggtttccagttgatgaattatttaggaagggttaggcggtatagcatgattggaggaggcatgtaggggtgaacattgaggtttcagaagcccaagcttgacccagtctccccacccaccccccccccccgcaccctcttcttgtagagcagatttaagctctcaactacttctccaacaccatgcctgcctgcctgcttgctgccatgctcctcatcataatgaattcactctcggaaactataaacaagccccatattaaatgctttcttttgtaaattaaccttggtcatggtgcctcttcacaacaacagaaaagtgactaagacacagagtcacagagttgtaaagctacacaagagcaccctaatggattccgtctgtacatactgagaagctatgcagaagaaacgagcttatataagccaaggtcagccatattggttatgagtcaaggtgctggcacaaccttgtttgaggctgaacccgtaagtcctaaagtacatcattcaaaattctacaccttaatgtaaataactaagaaaaaccaatttaataataataaaaaagttacactcaagaaaaaaaatgaaaattgatatttctagtgacctgaaaacctaaaccacaaattgtgaaagaacagctcattccctgatggctccaaactggaaactttccacaagtcaaatctattgatcttttgcttctaagggttaaaaatcataaaaaataattaagtctcaaatggaaacgctgtctcagagacatacttgaattcagagtggtcaaaggctccatttaagttgcagtgttatgctttacaatgtagctatcgcctgaggtttttatattattggtaaataattcaacaatagcaacaacaataacaacaaaaaaagcaaagtgcaggtttaaaaatttgttcttatttgcaagtagtctctatgcaaatcatcccaagctgtttgcatgcatgctctctcttggtctgcagtcttgatctgaaatcccataacgagtgcacagcttgccacatcacactgaaattgcacaataaaatatctctaccattaagaatgtcagcccgcaaaacaaaaaccagacaaacgataaatatcacactgagattaccctaacactgtccaatccacagcttcataatatccacatgagttatgtgtaccagtcccttttctcttggctgccaatactttctacgttcatatagactcatttaaaatactggttgatagattggcacagccctgaatacacagaaaggccttttggggtgcagctcttataaccaataaatctgatatagaatcacagaatattatcagcttctttgccaagagataatgatatgtcaagtgtgtgagaaatttgttgtgcctggactacatagtcttagctatgccaaagaatgtccctagacttggtcatgtgcattcacctgcatttcacattctttgacattgcagtgggtggcttggagcactggtcaacttatgtgcgtgtgcgcacgcacacatacacacacacacactcacactatgtacttgaaatggttgaaattgttgtatgagccaagaatatgacacctcaatgaatatttatgtgacttatttgagatagctattctgagaacctgcagacataatgttacttttgaaaagctatctttaagctaggaagacagctcagttgacaatttgctatggaaacatgagcacctgagttcagttcccagaacccacattaaaaattaaaaaaaaaaaaaaaaaagaaagaaagaaagaaaaaaggaagccgggcttggtggcgcacacctttaatcccagcacttgggaggcagaggcaggcggatttctgagttcgaggccagcctggtctacagagtgtgttccaggatagccacagctacccagagaaaccctgtctctggggtggggggagggaggaagtacttgttagtcagctctggggaggtagagaaaagtgggtccctaagactcactggctatctagcctagcctactggccaattccaggccaatgaaaggccctgtgcttatctaaacacacacacacaccacacacacacacacacacacacacacacacagagagagagagagagagagagagggagagagagagagagagagagaaagagagagagagagagctgttcatttgtaaaagaaatttgcctctacgtacattagtggaacaacagtagattcaagcaaagacttactcttgaggccccccctaactgcctagcgtctcacaagattagagatcacatctggtccaaatacagatcattacccactaccagctactctgtaagctgctaacttgagacatctcctatgttaggagacaccttccctcaccttcccataacatctgaccttatccctccaacccttcatctgtggcttcctaatttttgcaggttagtgaatttgtatgctttccccttgttagacttcctcctgccaatttattttatagatgagaacttctgccccttcagaaagaacacaaacttcatggcttctctgtgtaggaaacattaaatatgagttcttttctatcaaatactacaaaacttgtatttaaaacacaagacacaaatgtctccgttactattccactgctgtgataaggtaccatgtccaaggcaatctataaaagaaaactttatttggggcttaaagtttcacagggttagaattaaccctgtggccaagagcttggcagcaggcatgcgggcatggaggttgagcagtggctgagaacttacatcgtgagacccaaccaccagggagagagagagagagagagtgagagagagagagagagagagcctcaaagcctgtcctcttgacacacctcctccagtgtggccacacttcctgatccatcagaaacaacgacactaacctgggaaccaatcattcaaacaggtggcacatggggcccttatcattcaaaccatcataacaaggaattcaaatctttttgtttttctctcccccaatgtataagacttttgtgcagatgtttcatgctcccccttcaccccctcacccctgcaaagacctttgtttacacaggctctgctctgttccaggattaaagtgattagcccctttccccttcattttcttcgcactaattcttttaaaactgaccaatctcaaaagaatgtgaggtcagattccagccaaatgcggaaaagacacagtcaccaccttcattagaaataaaatccaaagcaaccctgtgtgcttactcttttgtgagcagtataccctcttgatcaaaaaaaagttgttttgtctcatggagatacttcaattgggaaggtaatctcgtgtgtgtgtgtgtgtgtgtgtgtgtgtatccccaaacttacttctaaatgcctatcttccataagaaataagacattaaaatactgcttttactatatgataaggacatttcagtgaagcaagcctaggtgcgagattaatctaaccgcacagacctttgctatttggaacatagagacaagtcagctacctctactagcaaagccagatttccttcccctagagctggcacaaaaacaagaggaccattttaaactgtagcctattctgcaaaatttacagatcaatccacgtcattttccatttatttctgtttctgcattttatgtacaagatgcagacatttgagaaatataaaccttgcccccccacacacacttccataccaccaccacctatcagtttaaactcagaaacacaaaggcaaaaaggtttgtgtgaccattatgaatttttaactcaggactcatgggtttagatggccctgaattagtgctcccaagaaggcagggaagataagctgaatgtaagacaagagatttaaaagctcttgatatatattttgagcctcgaggtacaacatatttgtagttctggtcacttcaaatatttgggaccaaggggctgtgaccaaagttcaaactccaagtgttactgggccagtgcatcaagcgccttgcctctgggagttccaataagctaggctcggccaactctccccagcacagcaagtactcgagaatagtaatggagaaaaaagatgtagtcaatgtggctaccttggaaaagggaaccgataaaggggttcagcaaaccccaaccccatctttgagacactaacatgagcctcatgaagacattggttcttcagggtgagatgaagaactccttatccttagagggactcagtcaggttcccagaaggtggttagtcctgctctggagtgagcgtcactgtggtcgataactaccctactttatgagggtaatttgttttgtgaagacagcgatgactctggttattttcaaccccttggactggaatgagacattatgtgagggcagaacaaactgccctcaagctggaaccaggagacggaggcagcaatccattattgtggccactgtcctggagaaggctcacaaggaacgagttgacaagttagtgtcccctatgactcagtcttagggcaacttattttatagtcataagtgagagattatatctggtgtgttcagtaagttcatggacctggcttttctgatatgtgttgccagtgtaaaaggggtggtttttggtttgtttgtttgtttgtttgtttgtttgtatggcttgtgtaaataagttagcagcctatgcctcatgattcattctggaggcaactagttttttttgttgttgttgttgttgttgttttctgtggggttttttgttttggtttggtttgcttttggtttttgcccaatccggatgcacagtcaccttacctctgcatttgcaaagtggggccagagcaaggcacagcccaaagcaactgtctcaaagtatgggacaacttagtacaggacagcctcttagaacagggcacagctttgtctccgggcctgtctcattaagagaaaaatcataatatgagatctggatgtagacactgtatctttgttgtttcaagagatacagatgcctgcctgcgcattaggaagcactcctcacgacgtatttattggagttcaacagaccacgcagttttcaaattagacaagagagcagagggtatgcaaacaggaggtggattttagagtaaccaagaccctgtacactaagagtaaaagtagatgaatccaaccctgagctgcagaaggacctttgtatctcgtctacacgagactataaatgtacacagcaaaagaacttgtaagttagattgtgattgaattccaatgtctgtgatcatttctcattctgatgcttcgcttgttagcaaaatcagtctgtgttatgatcatcagtacattaaatttccccacaaataggttatttattttcatcgtatgctaagatagctggcaccccccccattctcctagaagatttattggacatattttatggttactaagacagctgctcttaagtgtataatttgtattagtctgggtatacatgatgggtgtgagtaaaagagacagacagacaaaaacagattagaggcgagcagacagacacactaagaaagaataacttgttcagattcaagacgcatataagctttttttaaatattttttattacatattttcctcaattacatttccaatgctatcccaaaagtcccccataccctccctgcccccccacttccctacccacccattcccatttttttgaccctggcgttcccctgtactggggcatatacagtttgcgtgtccaatgggcctctctttccagtgatggccgactaggccatcttttgatacagcatataagcttttgtgtttgagaaaagaaagactttaagaaacaggaattatgggtctggagagatggatcagtagttaagagcactggctgctcttgcaaaggacccgggtccagtgcccaacacccacatggcagctcacaaccctctgtaactctagttccaggggatccaatacattgttcaggcttctacaggctcctgcatgtacaccatatatacatggtgtacataaactcatagtcacatacatataatattctctctccctccaggaaagcatataaacactatttgagttttaattgaaaaatatattaaattttatgtatatgctatttctgctcctcacctgctagaaaccatttcaattttattctaacttcctatttaatttgatacatattatttactttttttttaaatcttattttgtattattattagtagtagtattttgagacaaatctctatgtaccccaggctgggctgaaactcacaactgccctgcccccaacttcctgagtatcagaatcctaagtgtaccctgccaaacctggcctgtttctctcctttggataatgccaagtgccctaatttacagtcagtgaaagatgcagtttaggttcctatttacctgcaagcagtgggcaatcttatatattaaaaaaaaaaaaaaagtatactctcaaaatgtttgccccaggacagctccgtaagaccacctttggagtcacgaaactcaatctcatttcataatacccaacaggtgcgcgtattatcccttgttttctttcggcgtggcctcatttttacacagggattttaatagaacgagttgttctcctatcgctttaactccagaatcctggatctgcagcaataagcttttaatcagcccagttaaggggatgtaactccaagtgaaatgaatttatgggatctgatttttttcttttctttttttctttaataataaagatcacattgttgtaaggaacacacaaataaaaataccacacagctaaattaaggtggccactcaaacaataaatctcctagtcttaaggcaacattggacttcatggtcaaatactcagaggttgagaaggggttaaaaatctacctctttcactgacctaccctctatatttaacaaaaatttttaatccttttacaaacttggcctgtgggttttttgattaagcaagttaccaatatttttttcaagtactgcccagagaaacagttcaatgaaagcctagataaaaaagagaaggaggaggaggagggagaggaagaggaaaagaaaaaagaagaaataaagattgtagagaaataacctagcaatctatattaatctattatttgtaggtaaggtagtaactgttgtgtgatttccaatattcaaggggcaaaaccagacacagaggaaaacaattaactggacatatcattgtcttttgcaaagtaggttgcaaccctgggcataacttttctatgcaggattatggtcaagttatcagtatacaaagagaggaagtaaaaaagtggaatgcctagatgaagaatcctactgagatacttgaagatgctttttcatttatgaaaagtcccaaacaggaacgttgggggatgtcatacgttcaattttcatgtccaacaaagatggcttatggttctgagaaagcattctaccagttaccaccatactgccatagacctggccttctcatgaacatactatagggacacaccctgtgccttttcagtgagcaagtgaagtgtcacgttggacaaagtatgtcattctactgccagtccagagatgaggtacgaggattcgtttctacatttgaatcacattcccagttcttatgtcacgggaagagaaatcatgacagtggcattgtttgtttgtgttgtgaagggtcactatgcttctgagaaggtagtctttgaaattaaggtgagtaatcttaaaaggccgatgatgggaactctaactgtgaggctgtcatttccttaggaagctcatcgagactcatctgaagaccatacccagtcttgcattttcgagtctgcccaatatttccaggatgtaagtaattatttgaacattcagagaaatttgccgttaaaacacacttctacatcaatgtgttctgtcaagaacaagcaattggtagtgtccttgcctaagtcaatgacatctgcatttttatgtatttggaaattttatttatatagtacttaccttattagttacatcttgattttctgacccttataggaccctttgaatctaatacatgtttaaatctgtgaggtcgtgtcaagcatgtgtattttagcatattgtgggatgtgctgagaatccacacataggtatgcatctcttccttacccagccagtctagattgatggattcactttcaccagtaatacagtgcaaacactgacattttgtcacaaacgaagccaaatcgtttcagattcctctcacttaaaaacgagctaaaaagcattctaagccttaaaaataaaaatgcagtatgcagacagatgaaaagaggcatttccccattattctataacagccactgcctgtgcatgggtttgtatggattagtgattggctctgagtcaccaacgaggtgttggtgtcccattaaggaaagaaatgaaaatgtgtcctccttagaaccatttcactaagagcaagtccagacatcaactctctagttcatgttccctgtgtcttccagcctctgtgtgtctgttgtttgaatctgcatctgtgactgcttagaggctatcttgtgagtctgtctgtctgcctgtctgtctctgtctctcccctcctccttgtgtgtgtttgtgtgtgtgtgtgttctctgttgtgtggctgtgtgtatctgtctgtggccgtatgtatctctcctcccacaaagagctttgctttgctctgcatttattagagagcttagaagtcatcacacaaggaagacatgggacactttacaaaaatctttaccagagtttggcaaggatcgaatcaccaaccaacgctagctaatcccagcagacccagacaacaaacagttctacaaaaataattgtttatcaaccaatatgcataaatggatgcttttaactttcatagtaggttttaggaagttgctttctacttctgtgcttgatactttcagcaaatgatgcacatgtgttatcctgggtggaggcataatttaagttataacaagcctggaggctagtgaaaccagaactttggttcagtgaggtgggcagaatgaatgaacgtcatctctgagattcagtagggagcgtgggacaaaggctgtgagaggaacatagggaagtaagttgtcagcctttggcatgactcttgctccactttcatccatgacaaattctgtaaggtcctcaaacaataagccgatcctataaaatgtgttctgagattgtgtttggatcaagacaatttacatattgttgcttagtcacaaaggacaaatggctgggaaacctgagaaaccaaaggctgtttgtttatagaataaatacttccaaacagacagcacaggggcacgagaatagtcacacacaaccgtgccaaaaaggatacccagaatctaacaattatggctcctcttatgaagaatatcattcagatataatcgccagggaagcttttgaaaaatataagtacttggccctcataaccgtgaatcagtgatcctaggatgggtcttgaacatgtatgtgtccaggttgttcaattctatgttcagggctcatttattttcccagatagcatagtcgtgcctcgcaggaggcgggtcattgaatctgtgtgtattgttctcattataagaaagactctgataaaaccatctgaaagaagatcagttacatacagattcacaactgctcctgtaaagaggcgtctctgttcttccctctttcagtacctaaaacttttatttgcatgatattttgcttaatgatttcaagacaaatcctgacttttctgtttcattcaaaatcaagaaggcgggtcttaagagagaactgggtctgcatggtttaaatgtactagtgattaactctgggttaccaataatgcattgtgtcacattaaagaaagaaacaaaagcatgcccccttgaagccatgtaactaagactctaaatttgaagtgtctactttgttctcctgtggtttctgtcctctgtctgttgtatgagtcttaatctgtgatctgtgtctccctgaggactgtctgcattatctggtgaatctgtctctgtccctgttcctgcccctgtccctcctgtccctcctgttccctgttcctggcccccaccgccccacccctgtctaccctgccctctgtcccctgtcttgtccctgtgccagtcctcatgtccccttcccccgatcccacctgcccctttccctattcctgctcccctgtccctgtgcaccccccccccgctttctctcctctgtgtgtgtgtgtgtgtgtgtgtgtgtgtgtgtgtgtatctcaattgtgtgtctgttcctcacaaaaggcttcaccctgtctttattaaaagcacagaaagcatcacatgagaaggaaagggagactttacaaaaatctctaacagagttttacaggaattatgtccgtggctgcaacagatcccaacagacccagataacaagcgttgcttatcaaacaatacttataaacagacgctttcaacctttatggtagattttagaaaacggcctttaacttctgtatttgctgctctccacaaatgatacgcatgcgttgttaagggacgggggcagggaagactacataattgaaggttgcagctaagcattagcgtaggttgtgaaagctgattacatgggaattccaaggcaagtgaggttggctgttacattgtcctcttaaaagcaggtaaaacaaacaggctgagtgcacagaaggctagcagtcttaagtgactttgtgaagtcctgcaaaaggcccagtgtctcagaatgtaacagatagtttcagaatatttcatcatcacgacagccaacaccctctggaatgccctgctacagaaacgtgatttttctcttcaacactttggaaattacatcttattcccatgcttcctgccctcctttaaaaatgcttcttattcacgctaatgttcttttctgatgcattctggctttgctattttgagtaatacatctattcatctattcatttgtatattcgctgagcatggatttcctgagtcggcttaatgcaaaaaactgtacaagccatgcataattcaatggtccaaagcagaaacaacactccacaacagacgacttatggtctaatgacatggtgtaaatcaaatgcaaaccaattagttagaaaggtgcaccatgattatccataaaaggaacactcgtggtgctttgaagttgtactgtgggaattttaaccttttcaggaagctgtagaggaataaaacaaagtattggggaattttaggcatactgggatcctaaaaaaattatatagttaggtggtttgtgtatggcctattatttgaaaaggccccaataaagaagctatacaaaaagcagtctgttttaaagccatgagtggtggcacacatataaatcccagaactctggaaatggaaatagatggatatttggagatagctggccaggcagcctagtctacttagttatcccaggctaatgatagactttttctgtaaaatcaatgtgaatggcatctgagttatgacagtcaaggtttcttctaacctacacacactacacacacatacaccacacactcacctgcatacacatgagcatagacatgcatgtacataagaagtagtatgcttttatcccagatacttacacaccaatgctaactgtagcactttgcacaccactgaaattatgaagccaatctaggtgtccatcaacaggaatggataagaaaatatggtttatagacacagtggaattttattttagccataaaaaaaatgtaatgttaacgcaactgcagatcattgtactaactgacttaaggcaacctcagagagacatatactgtaagtattctctcacatgtgagttctagcctttatggatctataaagtcaagtcatatgaacacagattgcctgagaatagaagcaatgctgttgaggtgaacagagaggaatgatgggaaatgggtggaccaggagaagagggaacaagggaatgtgggtggggggctgggagggggagatgcttaaagcacattacatcatggcattatcataaaccaatatggtgaaataaaagggagctttgggagttcattgctaactttctactttgtcttatcttttataatgttcagctatttatctatagatgcaactctgcagcggctggaaccacattctttctacaatttgagtaaaatgactcacatgtaagtataagaaaaagtacaaaatagacccaaatgacagcctccatttaaaatattttttacattacttttctgtggtgtgggatgtgccacaatatgtatgtgtaggtcagaagacaacgtgtggaagtctattctttcttttcaccccgtgggcttggggactgaacttgggtcaacagatgccctcagagtctgagccatcacaccagacccataaagacattttttaaggatttgtcagggttagactcaaagtaaaagaactattaaaaggaatgtttggaaacaaaaagattgcccccaccccaatttggccatacattctgtacagaaaaaaattaacggcagcagaggaggtaaatgtgaaggtagatataaagaaatttggactatataaaacaaaaactgtaggatttaaagtacaggcaacccaggtcctgcacaatagcctggcatcttaaaaacatacagactgaatctgggtaaaaacaaaacaaaataaagcaaacaaacaatcaaaaaacactattcaactatcaataagaaaagtttgaatactttgtgacatttaaaatcattgtcaaaatattacatttttctctcactgttctaaacatataaagaaagacgagatactaaatctaatgttgtttgaatgcatgattttaagcatcaaaatatttagaatgacagtctattttaggtttataaagccatactaagaagttcaaaccgcaatcacccatttttggctttgttgtatgagttattggaaagcatctttccagtgtcttggcaaattctaggcctggatgctggtgttcaaccctctttcttatgatgcaataaacaatctgcaagaatttcttctgttcttgaggagactggggcaggttgggaggtttttgatgattgttctggtttggtttggtttggtttggtttggtttggtttggtttggtttggtttggtttaggattctgagaccaagtctcatcctatagctcaaacaagctcacagcaatcctcctgcctcattctctttaatgttgagagtacaggcataagacacccatgccttgttttgaggtagaaagggaggttgaaatagggtctcactgtgtaatccaagttggtcaagaatttactctgcactacaggctggccttgaacatgtgctttctgtgctggggttacagccacacaccaccaagacaactaagccctgcaccttcatctttgtccatcaatccactgtttcgggtaactcatgtcataccaatccgttactcagaagctcatgagcaacatcgtattctttattgtttgtgagtaaacaattgtgacaattaccagtgactgaaatggtgatgtaattgatcacctactatatgattcccattgaagaattaaaaaaaaaaaatactgactgccctgagaacatgggccccggccagatggcctaatttcccggaacttttgggaaaaacaaccagagaatgtttcaatgtcccaggtgccttgaagtaaatatctgcccctagactttttttttatttttttttttctgatcctccccctaggttgtggtttttgcctttataagcctgctggaaaatagggtcagggtcggactcctctacccctgtgtggtgtataggtctcgacctcagcatgctgatttgtgtgccattaaaacctcgtgtgtttgcagcaagcttaactgttgtggctttctgggctcgagattcctgagactagagtgagggtctccctttaggggtccttcaccatctgttatctatccaatgatatgtatgcaacatacgtagcagtaaagcttgcatttcactcgttattcagctaacattctatgataactgcatttgaaacacttaataaagctggttacttaactagatcaaaataactgatctgcatccagataagcacaatgcaaaacaaggaatgcctctatacatagaattaaaatacatgatatcaaaaagaggatggagaggttgtgaataatgtaatatcaaaaggttctcgagtcttcagattatctaagtggttgtcttagttgcttctctgttgctgtaataatcataacaactaaccaaaatcagctcagggaagaatagcatttatttggcttataggttacagtccatccctgagggaggcccaggcaggaacctagagacagaaacagaaaccacaggggaaccccgcttattaactcactcaccatagttttcttacatagcccacacccacctgcctagggaagaaggcactcttcacagggcctgagcctaacctccagttaagaagatgcccccagagatgcccacaggcaagcctgatagagacaattcctcaactgagattccttcttcccagatatggctagactggtgtcaagttaacaaaaactagccagcacaatgttaaaacttaatatcagacttttataagtcatgaatcgagttataatccatgggaaagtgattcaaatagttgtagaagaatgaataactaacaagctaatagttgagagggatgaaagtattaactaaagaaggtttaataaggcaagaaatgaaaaggaataatagcctgaccaaatagtaaattcaatcccaaataatcactgcattacacataaaatgataataataacagaaccgatgcaattctaattaaaatacaaagatttccatactgaacaatctttaaaagtctacttgactattgcttgcaagaggcctatttaagtgcagtctggaagggttgagagttggtctatgggactgaatgactcaggtgagaacaaaggttaacaaggaaggaaatcgaaggctaggaagctgttgagtaacataggctctgagccttcaactcccatctcatgcccaccttggggctcctctcctctgctgctctcccatagtgaagtacttgaggatgtgtgtctgacaaagggccttagcaagcactttctttgttccttgtgttgcttagagaggaggggaggggaggggaagagaggggagggggaagggaaggggagggaagggaaggggagggaaggggaggggaggggaggggaggggaggggaggggaggggagggaagggaagggaagggaagggaagggaagggaaggggaaagggaaaagggaaggagaaaaggaagggaagggaaggagaaatggaaagggaaggagaaatggaaaggggaaggggaaggaaagtttgactgaaaggagaaagttgatataaaccacaaatgtccaaatgctactgttgtcaaagacaattatgtgtgttctaaaactgggttgttatgatggtcaattcagtagctttactaaaaattaatgaaccatgtgcctacgatgtgtgaattttgtggaatgcaaattatccttgaataaagactctttaaaattacaaagatcagattttaagctttccaattagtagcatgtgcccttggtggccaagactcagaggctatctacggaaagaaaggctacagacctcagtgggttcttaatgactttgcacataagtataggaagtgctgtgaatgtcttctagccaatctatgcatgctaaatacttttaacttaactagtgccagcccatggctcacggttgtcactaataaactacacgtgactaatgttaactgcgtgttttgatcagtgaatacatgaacctaataatataagttataaactcatgtgatatcacaacacatatactaaagccttcagttactggcatcatgaaataaacccaagtgagccatttaggcttactctgtcccttgtacctgcaattgtaattaacagactcttggccctttttgcaatgctgtcatctatcaggattcactaacctctcattccagtgctcgtttgtcatagcaacactgctggctcctgtaaaaatacagatgcctgccctctggccccagctcctcgccaaaccactggagggtttttctttctaccaaaatctaaaaagaaagtggggaagagaagaaaggaacaaaaagagcaaacaaaatgttgagacttcagatcagaggaagggagtccataaattcaaatggactgagagcaagcccctgtctgcaagagaggcaatcgtgtctgggaggagctggggatctgtagttagcgacatgaagtccctgtcctaccacataagtacatcagcgtctttttgtgtacttttgttaatcgtgatttctctttagtgaaaacaggaagggatgaagtttgatgagctcttgtaactcttacagagaaatccggaacaccagaagcttaacctatatagaccctgatgccttgacagagctccccttgctcaagtttctgtaagtactgactccttctttattatgggtgtgtgtgtgtgtgtctgtgtgtgtgtgtgtgtgtgtctgtgtgtgtgtgtgtatgtgtgtgtgtctgtgtgtctgtgtgtctgtgtgtctgtgtgtgtgtgtctgtgtgtgtgtgtgtgtgtctgtgtgtgtctgtgtgtgtgtctgtgtgtgtgtgtctgtgtgtctgtgtgtgtgtctgtgtgtctgtgtctgtgtctgtgtctgtatctgtgtctgtgtctgtgtgtgtgtctgtgtgtgtctgtgtgtctgtgtgtctgtgtgtctgtgtgtgtgtgtctgtgtgtgtgtctgtgtgtgtgtgtctgtgtgtgtctgtgtgtgtgtgtctgtgtgtctgtgtctgtgtctgtgtctgtatctgtgtctgtgtctctgtgtgtgtgtgtatgtgtgtgtgtctgtgtgtctgtgtgtgtgtgtgtgtgtctgtgtgtgtgtgtctgtgtgtctgtgtgtgtgtctgtgtgtctgtgtctgtgtctgtgtctgtgtctgtgtctgtatctgtctgtgtctgtgtgtgtgtgtgtgtatgtgtgtgtgtctgtgtgtctgtgtgttctttacacttgtgttgctggtgtctatccagaatctccctaagatgatattgtcttttgtcatcatttgactcgtgtatggcacaatcaggtcacttgtgacttcttgtgacttctcatccttcctcattgggcaaagcaccatatgaaaaggctcagatgcttaaagcctattccaaacatcagcacgtggctctgggaccagagaccttctccaagagacatgaggaagaaaacagtaaaatatatatgtagtctttaagtatggacaaaacaaaatcctgagaaccaattggtcaattttgtttgtaaataatatatgtatttacgttatttatattgtttatattatatttatttgtatttatattatttgtgtttatctttatttatgtttgtttatatttatattatttatttttatttttaattgttgacaaaagagtattagaaatctcagaaagcaaagcctcgaaggagaaggggcacacttccgcatggctttagtgatgacttatgagccatcaactccatcagagcagaggacattttgattctgttccatcctaacacacaatcggtagtacagaaaaaaattcctcagatgtctgtgcatatctgacccaaggtcctctggtcaccagctgcaagaaccttctctcctgcacaaatgcaattttaaaaattagaagaaaaaaaaaacagtataatgaagataaaagccaaccttaatcactgtgcctagaaatgatcacgattacctcttctttttttttaatatttttttattacgtattttcctcatttacatttccaatgctatcccgaaagtcccccataccctcccccccactcccctacccacccattcccattttttggccctggcgttcccctgtactggggcatataaagctattccagcttttaaaataaaggtatatcccacatatattctgtgaggcaaatctttaaggatggatacacgttattcaggaaggacagggacaatagtagaggggcaggcagagggacagggtaccacaataaagacagaagtgtggaaccacatggctcattaggggaaaactgtagcagcccagtgttgaaagggtgggagtgggagacgccaaagtaatggcgtgcatgcgtgattgaaaggtaccttgtgggacaaggctgtcaacccttttagggacttgctttccactcggcagatggtcaatcaggtaattagagggggcatcaaagaagaaagggactcatttagtgcttttaggagagtagcaaggtcacgatacaagtctcacgagccgtgcgtttctggacgccactcagctccccggcccttttgcccctactctttttccgtgaacccccagccactaaactcttgccatgtctcatagacacccagaggatgtcgcttctggattgtcccattgattcactgtgagttctctggctcgtgctgcctcttcgatccaatggcttcctctttagaaggactccaagactgaatttggttttagacatgtatcagtgaagcatggcgggggtatagcggggtgtactagaagagctggtaggatctaaatctgtcccccgccaagacaggcctttcaaacttgctctgttagaaacataaatcctggcagcattaggagcatccaaacttttgtgttcacgttatattttgaacatctttgaggcttgacatatttttcccttgatggcatgaattttgaaaagagaagctgttttctttctaattttccttcctttctgggcatgtttttttaaatgccactgctgtatactcacgggtcactactgcaaacaagacattcttagcaaaataataatgcaatatgaagcagatttcgggagtatgtggaggggacagggtctctctacatggccctagctgatagccctaactctcctagaactcaccatgtagaagaccagactaacaccaaactcattgagatcctcctgcctctgcctctggagtactgtatcgatggcataggtcaccatggcatatgtagagtttaaaacaggaaagctgacttagagttgggtagtcatatattttttcctccattggccttttacagcccatcccccagcgcacacctacagcattttccaattaaaacaggaaactctcttttgcttcctcctgcctcctcctccttcccttgtcacttcctgtcctgtttctaggactctcgctgagttcacataatccacagagaattctaagcagcacataggcaccaccagcattgattggattaagctattttgctttgaaggaatgtcattccgtactggtgttagcactcgccacagtcatgacattgagtggaggccttggaactcgtccttccagccattgcagtatacttcctaggtgttgattttctttcctgaaactttcgtttcttcttctttttcaatgtagtggcattttcaatactggacttagaatattccctgacttgaccaaaatttattccacggacatattctttatactgtaagtatactcaacatgcagtatttggtatattttgtctatgtatatgaaacatggcaagaattggggtacagtcatgggaactagcagaagccaggaaaagcaaacgtccaagagagagcagatttggggggaggcaggaagggggcagggtaattgtgctgaaggatggagcgagggatgagtgaaatgatggcctgtaacttggaactatagccaaataaaccatctcttccttcccagtgccttgtgcccacggaggccagaaaagggaatagaatgccttagaactggagttagaaaccactgtgagccgccatgtaggtgcagagagctgaacctgggtcctcttcaagagcagcaagagctctgaacatctctccactcccctcccctttgttgtcttttggtgacagaaatgaagttagaaaaactcaaaagaattggctttcttccctttctctaattcgcttccccctaattctttcttgaaccctgtcttagttaggattaatattgctgtcatgaaaactccataaccaaagaaacttacggaggaaagagtttattcagtgtatacttctacctcacagtacatcatcagaaagagtcaggacaggagctcagtaggagcaaggacctggaggcaggagctgagctgaggccatggaggggtgctgcttactggcttgctcctcatggcttgctcagcttgctttcttataaaactcacagttaattaactgtaagtcactggttattctggcaaaaaccattcttgtaagacaatgggaataggaacctaggttgaaatgggtttgtgctggctagttttatgtcaacttgacaaaagctaaagtcacctgagagaaagaaacctcaatttttaaaagttcctccctaaaaatcaggttttaggcaggtctacaaggcattttcttaattagtgattgatagggagtgcccagtccattgtgggtggggccatccctggactggtggtcccaggttctacaactcagtaagcttcgtccactcttatgtgacttagaattcagcccctgaaatggtgccagccatattcagggagggtcttaccacctcgattaatcaggacagttcctagactattttctttaacactttacatgaaatgttctatttatttagtgtatatgtgtctttatgtggccgtcagaagacaacattcaggggtagattctcagagtcaaactcgtgttgtcaggcctgagagcaaacacctttacccacagaactgagtcaaggctctgccaccgtcatttgatttttaaatgggaaaaaaatgatccaatgatttcccagggggatgactgaatggggaaggggactcctgctaacaaggatagctcactttccatattttctgatagcttttaactcttcctgccccactcaaccacctcttgaggtgtagagggaagttatcggtgtccttttcaacaaacagtgaagcaaaagaccagaaaattcaaatgagtgtgtgatccgagctacacagtgcagtcaagagccctgctttggattgactctgatgcctttttttttttccaaaagcatcagtcagaccagttgtcttacctaatcatacaaatgaaaaagtacggaaacaggagaattgcaaaggctgagttcacactgcagactcagcaaaatggagaatgatcagctgcaaacattttctttgtttgtttttcctaagacaggatttctctgtagccctggctgtcctggagcttgctgtatagaccaaactgggctccaactgagagatctacctgcctctgcctcaaaggcaccaccactacctagcatgctgcaaactcttaatatttttcccccctaggagggaaaacatgaccatgtctctttactacagataagctcgggttaaacataagccgtcctctgggagcaccaggttggcagtgttttgtaaatagaggacattctaatgatactcatgaaatgagatccattgatccctttcccctgatccttctattgacatagaaaattctagttgctatggacataatattacagattcagaagtctctcagctccatctgcttcaagataaggagtaaggcagagacctcagctcaccgtggagctcgtttgcttgattggatgctctattctgaatatgtatccatctagaacagctctcacccacctcatgtgattagaatcaccagcgctcaggatcgggtcaaagaaacagctaaaactgtgatgtgttgtggctggttccttgaagtgcatctatgtgcaacaagaatccatttccagagtgcttcttttctcaacagtttccatcgctttctcttgcagtgaaatcacagacaacccttacatgacttcggtccctgaaaacgcattccagggcctatgcaatgaaaccttgaccctgtgagtatccagtttcactcttgccagtacctgaattttatctgaggctattgtcatagttttcttccccccctcccctccccctccccccaccccgccccatctgctaaatatgtgtctgactttggaaggatgctaccttctaatgtatactctgaatctggaagggtttcatagaattgagtgttgccttgtactgtgatattctatggatcccaaacaggataagataataagaactgcatgttctcttatgataggggttggtgcatttgttctgagggccagattggttatccaagttatactggctcatagcaactgccactgcaaaacatagtcaaacacttacataagtcactgggcaagtctgcatcatcattgagtccctttatggaaacagagtgtgggtcagatgtaggctggaggctttgtgacacagcatcctacatacaaatatcccaaatctacagagcaggggttctcaacctgtgggtcgcaaccctttggggggtcaagtgactctttcataggagctgcatatcagatatttacattacaattcataacagtagcaaaactacagttatgaagtagcaacaaaaaataattttatggttggggtcaccacaaaatgaggaaaactgtattaaagagtcacagcaatagaaaggttgagaaccaccgctgtagaggaaaaagttccacagagtaaatgtgactgtcacagagtccctgaatatagagtagtaccactaagggcttttcatagtccccaagcacactttcacccagaaatcagaaactatgacagagctcctatgactgcttgttcaatagaaattagcaatagagttcatgaccttctctttggatgttcaaaagtagatactgtgggatgtatagtactgtgtaagtacagaacttgcctagcatgcatggagccgtgggttccatccccactaccctataaatggggcatagtagcacaggcctgtaatctcagcacttgggaggtagagacaggaggttctgaggttcaagctcaaccttggctttatgacaacttccagactcagtttcaaaacctagaaagcaatctaagtagatacaaaatcagggagagtcataaaatattctaatggagaagatctaatgggaatataaaagataagctaactcttcaagctggcagaaatctcttctctcattgtgatagtcacaaggtggattcagggccacctctgcagaccccttctctctagtttccatagcaccacccccactcaagactagaagggttttgttttgtttacctatatggtcaccgggattctctacctctggccacactacagcctagagttctttgctggatacaaattggattgacttagttcccagccaaattgacccaagcctccactcagtttttcccagggacctcctttccaagccactgcttaggtatccatttgggtcatgtgaaccatagctcttcttccccagtggagcaggtcacatatggttttccagacacaggtggacctcttgggcaagggcaagtggttgcaactcagccacctttccttttagcaagagtgggctctcagcctgctcagtccctaagttcaaggccatgcatgtcccctgtaaaggtttcctgcattaagtagcattcgtcccaagttagtccctccatcctcagcttctttgcagaatgttagcttccccttgttaatacttttgcccaggatctccattccctttcaaaagaaagttgtcctacgcctcctttggggaacagtggtgggatcctcaatgtagaggtgagaatggcatgagtttgtcaactgtctttccaggtgatttttttttaaattatagtcttataaaagccctttctttcttgaagattaatgaagctcaaaatgctaaacattcaaggaaaacacccaaccgcagagttcacgtctgtgtccccacttctttaatttctctgccatttacaaccttcaagacctgcttgtccatgaagtttttagtgtctaaaatataaatcaaaccaagaacgtgtgtgtgtgtgtgtgtgtgtgtgtatgtgtgtgtgtgtgtgtgtgtgtatttgtactctttagcgtaggtgtatgcatgcaggtttgtgtatgtacttgtggaggcttataggtagatatttttttttttctcaattattctccacttgtatttttggggacagggtctttggctgaacctgaagcacatcgatttggctaggctagatgctcaatgagcttcaagtacccgcctgtgtccaccccatgctcaggatgagagttccaggcatgcatatgctactctgcttgacttcttaagcgggtcttagggatccaaatgtcaggtcttcatgcttacatggctggcatttactacatgacccatctctcaagcccatcaaggaaaaagttggaggaaataaaaatgtgttaattttttcacatatttgcaaaagagttgcatttctggaaaagtgaatttattcactggtatttttccctgtctgtgtctaagtccctggaaaacagattgcaatccatacccatggttctttagaaattagaactaaattcgggcattttaaagacaaaacaaaagatgcacaaacaacaacaaaaccaacagattatttctcaatttcttacaattatctagaataaattcgaattttagaattgtccttcaacattgtcttcttttaagcattcatcattattagctatagtgcctctgtctccttagcaacttgtaatgaagtaatagcatcattatttctagagattaaataaacaggatgaaagaggatgtgacagtctcaggatcacccaggtattacgtggcagaactaggcctgattgcaaacttggagactcctctgtagttactggtttatcgagtgcacatgtcatagattacattattactgaagttctcccacgcctgtcccaaggaattccttaggaggaaatgcctgttgctctggtcatggctgttgtctctttatgtcaaaggccaccaataaccacatatcttagagttccaaacactggggtcccttctcctgcagaggtgcatggttttgataggtgagaagaattgtatttggggtcaaggatcctgatccctaataagtttagactaacaagttcttggcgagtcacttccaagtctcagtaactttactaggaaacgcaggtggtagcatttcaggctggctcctgggaatctaggtagaaaaaaattaattagctgcagatgcattgcctgttaaaaatgttcaaaaattatcacaaaagggcattatctatctgccttcttagattcttctatgaggctcaattctacctgtaacccttaagcttttggcttatgataaactctgaggataagtagaatttttttttgaaagaaggtaaaataacattttaagttaaaaaaaaaatctatacattcagatgaatttctcctcaagtggtcatctctaaaaactgctgtcatgcctccagtgttgacatgagcttaactttcacctgaagccctcttccctttaatatgccctcactgaaaaaaaaatcctaggcactagagagatggctcagcagttaacagtgcttactgatcttgcagaagacctgagtttacatcaataataataataataataataataataataataataactgtataaaatccttgcaaaccagcgttcttctaagtctgctattgaggaaaagctgacttactggcacccgggactggagactggagcttcaaactgggaaacatcttatgttctaaacaaggcatacgctacagttttcttaagggatgcatatgaatgacatgagaaattttatgcacatttttgatactaaagagatgaaactcagcaattaaaacagaaaaaaaaatgagcaacacatatgccacgggcgatctgctttacttatttattcaggtctgggagttcagtgacccagggtcttacatatgctaggcaagtactctaccattgaactacgtggtcattgttttgtttttctctctctctctcctcttgattttaggaaactgtacaacaatggatttacttcagtccaaggacatgctttcaatggaacaaagctggatgctgtgtaagtttagggtaaccatggtaactgggtaactgccaccatcccccacatctcactcccaggactatccagagggtctcagttctgttgggatctattttaagtatctcaggccttgaaaataatgatgaaggaacttgacaagggccatctggtgtggatacttaatgtcggccccagtcctgtaccccaaagctctcatcttcaataaaatggagatgtacatcaccaccatgagttatcttacaggggtgtgtgtgtgtgtgtgtgtgtgtgtgtgtgtgtgtgtgtgtgaatgttcatctgctagtacatgaagggaaagcgtatctttacaccaaaggtgttttcacaaagtgatgcaatctgttttgacatgttttttcttttctaaaggtaaatgatacccaaatgatcaaaccaaacagacttacattttatttgtcttacaattttttttttcaaagtagtgtcttgctatgtaaccctggcagtcatggaactagctatgtagacaaggctggccttgaacttacaaagatctgcttgcctctgcctcctgaatgatgccattaaagctatgcatctcttgcattgcaacccttcttatttctttagcagctatatatttttaaattcaaaattatctggtattccctcccaaacttaactgctcatttcttacagtgatgtgttaattacggcctcctatgcttctatacccttccttccttccttccttaaaacattccttatgtagttgccgactgtaaagccggagaagccttatgagtctaaatgtgttgtgtactactttgcttctcaaacactactaggcatgcaagccatcaagggaacttgtgcaatgcagatgctgattctgtcgacttgagctgggctctagaagcctgcatttctaacacaccctttcacgatgctgatgctgtagcccatggactgacttttaaaataactatgcaactaaacacagaggggctgggtagaaaagaacacccgtgcagagtaactgctttgggttgatattctggttagatactggcttctggaatggttccattttaatatgagttctggatttcttatagttaggcaaggttctctacaccttgttgaagtggagtctagctcctggccatgcttttgggcttccttccagtctctatgagagaaagggttagaatatcattcacttgggtatttggtaaaacaagagttgttatggtttgactttattcatttctttaaatatataattacaggagaagccttgtaagacgccacaggatacacacattcttgcacttaaaatttacagaactggaaagcccgattgcactaattctgcgcagcccttcatttacttctcagtatagcgagtgggggcctacagtgcacaaaacactgtgctagccactaccaaagcaaagaggagcaggaagttgcttcctgctcacaataaaaatcacattcttgtggagtcaatataaacccagctacaccaacgattaaagtgcattagaaataaatttatccaattcaaaatatgcatccactagaaaatatacaagtgcaaaataggcaaagatgttggtctccttccctggagaaatcagcatgatttgatctaaatttatcccatggtatttaaagatcagcatttaatattgtgaaacaccacaaaatattttctcctttgatttgaaagccgtcactccaagctagctggcccacaagcttcaaatcttcaacttaatatctctacctcccagaatagggatgctggggctacatatgtgcctcctctactccaggcctttatctgggttccaggaatcaaaccccagtattcacgcttgcatgcaatgtgctcttagccctggccatctctctagaccctcgcataatattttgtaacatagctcagtatttactgggttttcaaactaagaaaaacgtattagtcctctataataattacccaaacacggttcaaagattgtaaatagcataacctctctagaactgtctttagatctctctaggttctggctgaaatagattgttatccaaaacagcaatcatccacctcataccaaatgcacttcaatgatcgggtctgatctcaattacacccattgttttagcgtgactgagtaacattatcacagccaagttggatgaatcccacactgaggacaagctctgaagccacagcggcagttccccccttggttagaaatcggggaaaatcatgacaagtgggggataactcctctccctgtggtttcacagagagccaagaacacggccattactcagacaacagatcacctaatctgagtatccttgctcaaagagcagtggaactgctgtcagtcataagctggggcacttgttcattcactggatctctccgttctctcgggatacagtcttctagagctgggttgcttctcccacagtgcctgagtctctgagatgaattttctcttgttgaattctagttgtttagcttctatctagaagtaaacatttggaccaaaaataaattacttaatacaactcggctgtgtgaaggacttacccagacaataatggttattgagcagagaagtcaacacaaataatgtgctaattagcatcacacattagctgatgggaagcaattctccacagcctggagccactgggaaaagatgacgggagagaagattataggcttaaagtagactgccatttctcacgggataagtatttgaacagcttgtaggatatgctccaaggttggctgtcccctctgcctcctgcagttttgaacactttctcacctgtcaactgttgataaacaagtgacccagtctctgaaagcagcaagatttccacagagcaatccagcttcactttagactaatggaagggctcggtgctagatccctatcattttccgactaacaagagccatgcagaaaacaaaaacaaaccgacacacggttctccacagacacactcccctgtgagtgtcaaactataaccaggtgccaaccctagtttcccctaaaggaattacaaaggaatgagccgaaactctatattggaactgaaatggatccttaaactcccccagaaaacacagtccaggaagaacagcaaatgtcctcaccacagtatatctcactcctctctttgatactgaactctcgcgctgctgaataaaacctgtcctatctgtgaattatccagaaacaagactttcatttctcatcgaacaagtctttactgattggctgctgtgtgtcgagactaaatccaggggcggagagatgacttggtggttaagtgcaccaactgctcttacagaggacctagggtcatctacacagcagctcacggctgtctgtgatgccatttccagggatctgaacccttcttctgacctccgtaggcactggatgcacatgacacaaagacacacatgcagggaaagcattcaaatgcataaaataaataagtctcaaaaaaagaaaggtttaaaaagtgagtccaagagaacctgaacacacacactctcacacacacacacaccataatgctgtcaattggacaattttccccaactcattgctatcttcatttgtcccacttctcccctagctgtgagatacatcattttccgtcaaagtagatattctcaagtattgaaatgtggaaaaattgacaactgttttgtaggagaggcttaatttcttcaccaggttctcaaagaggcagaatccacccaaataatgaagtcgctaagcaggcagggttagcagcatctgttttacttttgaaggaactatgaaggctttcctaggagcccttcctatcatgttatccatcctgactctaggaaatctctcctcccatcacttctgacaagtccttctcacctcgtgaaccttctttctgttcatcttccattatcagcctcacataaaatagtcactgtctggaataggctcgcatctggctgaccaagctttgtgactgacttacctaagccaatgggtacggcactggatggggattaagttatgatcaagaaaccagtttaaagagactggcgttcccagaaaatagcatgtgttcaatgagcttaatgaaagcactttcttcctgtatgctaaaacttctgtgtctgtagttccttctgtgtctgtagttccttacccttagtttctggtagaagctgcaaagagaagtcagaacccaagagtcaaagctaaaagaggtttccctgaaaactaccagattcttagaatgtggaagaggatgacaggtccaaggtcagccagggcttcatagtaagaccctgttgcagaaaaaccaacagactgtacatggaagcaagacaaggtcatttctaagcaccttatcatcttctgaggctaagtatccaaataaccatcctgtcttttgagaacaggcccttcctcaggccggttcatctccgttcacattggctgtacctcccgccacattctttctcccattctggactctggctgcctttttcagtttgaagtcttctgcaacatttctggtaaactgcagcgcttatcaagaagtctccttgtcctcaggggtatattaagtatcagatgagaacactacaaaattggacaagtgataatttcattttacaataattaatttctggtgattagagcgagcagatacttcctctcaattattggagatgaagatcaggaaagagaagttagcagagcttacttgattttgtgcagcctgggaacaaagtgtgattggcagctacactagcccaaagatccagaaagacttacaagctggtgtggtcactatgcccgacatggttgtcacattacaaaattgtgttcataagagcctatatccagttgggatcccccccccaaggtgggtctaacccactccagctacaaccaaacgaaaggtcttcatagaccttaatgagtctgtgaacatgagagtcctgtgactcaagctaattatgacattaacccactaagatcatgtacataggctgctctggcatctcactcaggtatctgaacatacagaagactggtctcctccacatgaaatgtagcagcttgctctgctggagacaatatctggaaagcctccccaaaaggggcccagccacagttaaaagaagaaaaaagaaaacagcagcctcctctgcctcatgcttctaccatagggagccatggtatcatagacacaatggaaccaactcatctccatggctgtgaacagaactaatcaatttctcttttatactgattgtatccatcattttgttataacagagagctacctactgcactctggaagtgtgtgctcagccactacttaaagaggccatgtgtgaacctttctttgtaaatgagctacctcagcatttacagtcatcaggaaggtccattttccaaaacccaccacatcatacactaagtcttctttcaattatcattaatttttttctttaaacagtcatatgtaaccccctcgaaccccgagtgtatcaatgtcactatcttgaaggaaacttatatttatttggttgtttgctcactcttaatctccactcagtatttctggagcaccaaacttagcagtgggtgtagggcaatggatagggcatagagctttccattctgattttaaaaggcacagtattcaagtaagaaaatcaattaggtaattacagattctgataaggtcaggaggaaatagtattgggcaaactagtgctactttaaatgaatagtccttgacctctatttaaaaaaaaataattgaaagagtctaaactgtattcacatttgtgaaacctcattgtttgtaatcctgatacttaactctgtttaatgccttagcatgcccaaaagaggggagggcgataaaactcttcactgctggtggttgactgttctattcttacccacactcaccagcacacacacacacctggatccaattaaatagagggaactttctctatgaaggctctggagaaaaagttttaactgaaagtcttcaattactctactattattagtcatcttccttaagaacttgcatcctgtagtgcaaagcttgctgctatactaacgacgccattatctataattaagcagacctcccaagggtctttactgtatttgttttgcatcaagccagagtcattcgctagcgtttaaattgcctatactgtgctgcgagtcaatgtaagtgtgtaaattggggtcgtttataataaagatgtatgtacttcgtttcattttagataattttattctctaaaaaagctatggggaagggaagggccaattttaaaatccttgggtgcttttgttcattgggaggaaattttatttcaaacacacattgtgacttaaattgcataagaaatattcttctttcaaatagccagtgtgctgtacaagagaaaggatcgacatacacatcacttttcaggaaagatgctcactgtaattttatttacataagtatccctatgccagaactggtattgttggataaaatgcatgccgtttaactaaatttgaatttcaaataagcaacagctaattttggtaggaaactttgtgcttgaaaattattcactatttatctgtaaattgaattaaagtagcatcatgcattttaatttgctaaatctggcaactctgctcaaagaaaagaaccatccctaccgcccaccaccacccttaccatctccaccccagctcttagttaaagtctagcttcagagatagatggggataatagtcaatcttaagaagcaaaatctgagtcagggtagagaaaacaattgccaggaaataggaaatctagccagctttgataaaatgtggatatgcaaattagacccgaaacatagttcattttcaaagattcctgtcacaatgaaactttgccttcccgacacatggaacggtgcttaagccaggagagtgcaaggtatcgtcaaaattaatgtgaccttggttacatcttatcttgatatttattctaatgttatgtgacagcttaagtttgtctaactcattttctctctctctctctctctctctctctctctctctctctctctctctctccctctctctctctctctctctctctctctctctctctctctctctctctctctctctctctttctctcacctattctgtctagttacctaaacaagaataaatacctgacagctatagacaacgatgcctttggaggagtatacagtggaccaactttgctgtgagtaagacaaatcaatggctagtagctttttattatttttctgaaatgaaagaggtgtgaagagaggtgatgccattacctctcttagcatttctacacaatgaccttgaaggccactcttgtaaaagaaaacatatacatagggggctggcttacagttcaaaggtttagtctgttatcatcatgacaggaagcgtgtgtgtgtgtgtgtgtgtgtgtgtgtgtgtgtgtgtgtgtgtgtaccgagttcaaatgaataggaatgggaggagtctgggaattagcattggttttggtatgtgtcaataggaagccagatgctagaggaaggggaaataagggagtgactcttcctggcagacagaaagtctttcacggattcctgaggaagtattcaccagcaatcctatagtccagtgtgggctgaaccaagactgtcatttctagacctaacagtaacaatccaggagtggttccatgcagacctgtcacccagcattgagagaggcgaggacaaaaggattgataggttatttctcctcctccagggaggtgagccaattcaaaccagattagaatatattaaaggcaggtttattgggaagctgttctcgggcaagttagctggccctaaggaccagggaagtcaccatggggaaagggggagatgggaggcaaaagaaagagagaaagggcaagctcaaagagagaaggacaagagaagagagagagcaaaatgtctggattatatagggagaagtctctgggggaaggacagccaagcgcctgggctggaaagttcagaattgggggcagggtatgccaggtagggactgagggatgctgggagaacctggaggccaggtctgctttgatatgtaaatgcacctcagtcccttgtcccagatccaaaatcaaacaaggaccacaggggcttgcttactggttttgagtctaaatggggaaaaaaaaagcatgagctccaaattctgggagagaccctgcctcaaagcaacaaggcagcgcgagggaaaggaagccgcctgatgccctcttctggtctctgagtacagagctacacgtacccatatgtaccatacacataaacacacatgtacccaacacaagccacacttatacaaatatacacacatgcacatacctacgcaaagtaaaaagataaattaggggtagagagatggctcagcagttacgatcacttgttgctaggacctaggttcagttctcagtacctatctagaactcggtcagcaccgaactgatagcttcttgacttatgaaggtacaaggcacacatatgctctacatacatagatgcaggcaaaatgcccataaacatagaacaaaataaataaatcttattttaaatttccaattaaaataatagtactgaacgggaaaaaaaatgaaataaaaggaggacatggctactcctaagtatgaagatttttattatggatataagggagaagcaggcagagggaagagtccaggctaaacgcgaccagcagactatgtgcaccatgagaggagagagagagggagagggagagaagagccaccagccaagagaggcaggcaacgagagcgtagtaggcaacatggccccgggagggagaggtttagggtagtgggcagggtgaggagtgatgtgttttataaaactctgtatgatgcagcaggacgggtgccttaggggcctataacaaagcacacacacacccccatcccaccccaggtatcagccataagatgggtctaacataattttgtgggggacctagagaggattctgggtaaggaagtagaggcagagaaagaaaggaaacagagaagacagagagacggacggagacacagagagagcagcagggaacacctgaggagggggggaaggagaggggaggaaaaaagaggagaggggagggaaggggaggcccagttgctaggtaactgttgggcagaacctagaggaaatgctaacaaggagtcctgggaggagccactgttactgagtggtcctgggaggagcctcaggtcctgggttcaaaagctaacaagtaccaatcattatattaacaaaaatttaattaaatcaaataaaatataggcggacagttaaagaaatcgccagcacttggaagttcagtaagagaaaaaacaaaaaacaaaaacaaaaaacagtatcatttctcaaatgagaagcatagaagttcataaattgtgtatgcatgacctgtaatgtctctgtaatttttctcttgaacctgttgtatcaaatttttcatttttctttcccacagtcttcccctaattagatttgacggtcccacaggaaagggactgtgccctgtagtttcataacgccctcaccacaacagaaattagcaaatacccagtgaacggctgatgcactataattgagtgtcaaatagctgtccatggcttggttgccatttggtctacaagctaaacctggaaaatccaaagaaagggggattttatattatgtgtgtttctgcctcatgtggtatcttggtaaaggaatagttttctctcaacagtcaacaaaatatcatcaaacctgcctatgtaccatcttttctcaaggtcatttctcaaagaagaatttgatttccaccaggcacaaatctaggacaccatctattctgccgtccttatgccccaccccacccccaagaaggccttttaatttagtttgggaatttgataatatttttattgattaaattttgtcatgaagatactcaatcttccctttccatttttatattttctattctttgactgccttctttccttccccctttattttgaaagaggagctctttgtgtttataacagcaaagaacacaatatgtggaaatgtaatgctctctgtaacaatcaggactctccagattctaaattatgtaactcaccttaacagtacttagcgtactcatgataattaccataatagtcccgatttctattataagtacctcttaagaagagacaatctttgtgtttatatccttgagtttgtattacatgtagcaacaaaaataagcatttgttgctgtcaactgttttcaagttcagcatttgaaaaaccccaggcatggtgctgccaactctcttggtttaaataaagtaagtctttgttttctttggtgctttttgtggttaccacaaggtcatagtcttagcagaaatctcatggtaaagttctttctagcatcctgatgcatctttgattttttttttaaatgatttactttttatgtacaagggtatttttgcctgcatgtatgtctctgtgtgagggggccagatcccctggaactagagttacggacagttgtgagctgccttgtgagtgctgggtaatgaaaaagtagccaatgctcttaaccactgagccatctcgccacccctggtggtctcattttttttctattcctattaacaatacatgagaacttcatgccagccaactttctttttctttcttattgatgtgtatttgtgtgagaatgtgtgtgtactgctggaaactgaacccagggcttgcatacattaggcaaacattgtaagctctgagctacatcccaagctcttagtttttagagacacagttttgaaacagctcctgctgttagctcccaagtaacttccagcattcactaccccacctagcttttctattcatctgtttgattctagtcattacaggacgtgtaaacggtatcttattgtggtctcggtttgtggttccctgaaattagtgatgctaatcatcgtttaatatccttactcacatttttatatttttctcttgaaaagggtctgttcaaatcttgtgtccctttttctgttgggttgtctgtcttcttttattgagttgtgatcctgggtaacattttggtcctaaaggaagtcagttttagctctaaccaccaccctctgccaaagaactttatgctctcttgttctcttcgattcctgaggagagccagcctatgcaagactggtcagggtagagctcattcgttcacttctatcttgggtattttgtcaaatgcctgctgaactccatagaagctataatgaagagacaaccactctcctcttagataggctaagacgaaatgtaagagaagtgtaaataagtggctatttacacttaatgtaagaagagccttaagaggtctatagaaaaacaaaatactagttctagttactagggtttaacagagaccttattaaaggacctgtgggggtggggagaggtaggtgagaaagactacaagaaaatataagccacattcaaagcacagactttaaaagactcctcagaatcatctcgtggagaaaatgatcagatgaggaagaaggccccctgcagggcggctgtgaagatagtagtagtagccaaagaactctttacaggatgtggccctcttcaactccccatgtgccttctttacctttaaccctggctttaccacatcctgggtacttggtgacagctcttctgtatctcctagctgcttataaggaaggaatcataggtccctcaaaggagacaagaatctagctcggaaacccatgtccacatggaccctgtctttcttgctgggttgctcagaggaactcctgtagcagtcatcttggaggagggaatgtcctagggattcaaccagaagactaatctgataggctgctctacttactgactgcgaaatcattgcaaaccaaaggcaagcagatgtgttgcagtgcctggctcaggagccacgttgctgaggcaccagcccaagtgcctcatgcttctaaagacactgccccaccttcgaggtcacagcaaagacactaaaatgctatgacttaaatgctgtgatttaaaatagtatttttttcctatgccggtggctacagtagtgagagacctaattaataaatgaggctctgcagtgggggaaacccaagtatctgtagttggcatctataatggcagcattactataatgcatctataatggcatcatttgcagagtgtaccctaactagtgaggcatcgtttgcagagcgaatcctaactggtaggcttccttttggaggaagagaggtgacagagtaaatggggagatcctcagagtcagacacatactagtttcttctttaatcaactaaaaatacagccattatcatccttcaaaggaattgttttttattttaaataaagaaaaaaattactaaaatcctaggaaccactgccctggatttattcattcagaatatatgcttttatatctatgctaaatgctctcgaataatgtttcacctcctagaaaataatccaaaaatccataagttcctcttgtagaacaattttaccacagttaattgtgcaaatcaagcgtggctttgtgtttgtcttttaccatgatacaaacaatggaacataggaaattatgctgcgtgaaccccaggaaacaacactgatgaagtgtcctcaactcgaagatgtcacataaattcatagtttattagctagtccatatgtgttaaccaatgtccctccacagtgatgaacctgaagagcaaacagtacagttgtttcttccctttctctatttcatgtctgtacatacatacaaataaatctacttttaatgaatgcctatgagactctgctaaacatgcctacacaaattttatcttgtactgttgacttaaaaaaattatggcctctccattgctattcctctcataagttttgatggttttattcatattgatgcaattacttatgattaaaggagttgatgatgcataggacaatgttgtaaaggttaaaaaaaaaaacctagtgtgttatgttctacagcaacttttacttaatgatgctataattagctagacaatcccagcagtgagcagctaactgatggaggagttggtccatctgagatcatcttgtgtttcaacaaataagccacaaacatcagcacaacatggtatgcagagttatgtccacggtttgtcccgtgcaaacatgagtgaatacagacttttttgtgtctctcttagagttcttttcttacaatagtggaaggaaaatggaactctgtgctgtcacatgggcacgctgtctctggcaggacctagaaatccatcgtgttcattaaattctgactgggagtccctttgttctcatctgcttatggtagagagtgcctcttgctagattcctgtttgggagcatttttcattgtagaatccataatgcaacaggcaactccatgagctctcataacacaacacaatgaacctgtagactttaactgtctactgaatttctgattgtagttaagaaattacacaaggaaaatcctggttgcaaagtggcctaatttaaaaaaaaaaaatggaataaataagaaaagatacagcttcaaggaccttaaaatgaccctaagtttttcagtttaggaattttcttcagggaattctttctccatcagcagcatagctgggagactgtctggtctagcccagcatttggcagcatttatctacagtgcccagttcaatatgctcagtaactggtggctaaaattaaaagatgataagttgagcctccagtcatatttcctcttccttctcagatgaaagatgatgaaagaggagaaaggagaatttcaggtatataaatctacaagggcaaaggagccagtgtctggcaaatcccgaataagaaaggtaagaggagagggaaagtgagacagataactcacaggagccgacactcagaggtattgtgctcagcacagaacctttgtggcacaggatttagaggggatgtgtatggcctgtgtcaagagagaaacatggaagaaaaagagaaaggactggctgaatgtgtctctctggagacatgggcctgctgtgttagttaccttccctggcaagcatcttacaggagaaagggtctgtttgtgactttagctcacagtccaaggtgacacagtccatcacgtcagggcaagcctggtagcaagctagtcccctgcatctttagtcaggaagcagacagatgaatgtatgtgctaaactagctatctcctttttatttagtccaggatcccgtcccacgggatggtaggctttctcacttctttttaaagggggtatttcttacttcacttaacccgatctcagtaattcctcacaggcatgccaagagactcatctcctctgttattttagattctgtcatgttgacaggccatatcaaccatcatacactctaacccattcatgcaaaatgctagcatcgaaatacctccctactaagagctcagggatttcaagtttcctttgtgaagaagtatttttttttaaaaagataccatagctgacatttcattagcacaatacttttatcaattctttgagaaatccccacatatgtaaatatattttgatcatattcattcctcatgtctccctctccctcttcccagaaacgctcccctctccctccctctccctccctccccctttccctccacctcttcctttgttttttaaaataacccaatgagtccaatttgtgctgccaaaatactctcaagtgtgagcagttttctggagtgggggagatctaccagaggccacacccttaaagagacccactctccctctccaaaagccaggcagtgtcagtgtcatcagttggggtagggactcatgggcccctctcccctccatgatggaatgtaacctgacattttgaagtcccataacaataacggtcacctttcttcacaattgccctgaaacaaaatcagccagtggcaacgctcactcttgagtgttaatgaataactggaggggggggggtcaccaggcaaagaatacttgttaacatgagagataaaaaccctggtaaggaaatggaaaagtgagcctgaagattcagacattgcagaggtcggcaaggaactttcacaaagcaataatcagcgacctgataaatctaagacatttcatccccacgactataacagtaaagacagatagtatttattgaggccacacagccagctgctgctaagttgactattggtaaatggagaaggcaggattcagacgtgaatttcaaactcatccactatatttgtttctttgccttgataaatccagcatggttatatccagactcgtgaacattgcactgggcttccctgtatagcctgttaccagaggaacaaaagaaaaacaaaacaaaaaaaaaaggttcaaaaatgttctcttgcacttggcaaaccatattcagagccttcggtctaagcatcaaaaatactgctctaaacaggacagagtaccatacctcatgaggcaaaggttaaaaaatccagtacaagaaatacacaacacagtgaaggaagtctaccaggagactaaagagcaataggagaaaaattacaacaaaagataagtacaaaagatcaagatgtgtctgaggaatgcaagaggttctttttccacttcctggggattccagagaggagaaagaggaagtatgaaaaacgagtcacctcaagaatgacaccagcaaacttcccagagatgagacagatcctaaagatccagactgaacaggcaggaaacccctgtgcccaggacaaaaaccgatccaagatccgcagtgtggcaccccttcatgaaatctcacactggggatgaagagaaggttccagagggtttccgaggccagctgtaaagtaagcttgagtttagtcaccagtatggttacacaggcaagtacacacatgcaagcgtacacgcataagaggagagacagagagacagacacacagacacggacagacacacagagagagttaaagcaactccaaataacaggaacttgagtggcatcctatttatgaaaagcaaaagcagataatgtaatataaatgaacaaataatttaaatcttgaaagagaattgacatttttaaataaagattggcaacccaaaatactctggccaggcaaagcactaatggacggtaagaactgatatgctagcacgctgaaaatcttcctacgtgacctttctaggaatttgtagtctaactgagatgatggagatgatcaagataaacgatgcagaatttagggacagactccctatggagggatggaagaatggtcttccaagcttaaatttccttgaaggaaccatggctttcgtgctgttggtgtaatatgatgggattaggttttaggcagaacatcctattctaagcgttaaagtgggattgttacatttctgggagaccttcattgcgtttttgcaaagctcagctgaaatgtaattgagacgtaagctgtggccgtaggaagaaccaccggaatgcatgtggacacgtgagtaactgagctggtatctgatggccagggggagcacaattttattttactatagagatttacggcataaatgtagaccaagggcaaagaagaccccatgaaagaacactgaagcttcaaccctggaagctggtacacaaaaggcaggaaaggttttgtttgtgttgataccagtaggaataaaaggaagattcattccggtagtactatgtcaagtggagatacagggcaatgtcacctgcaaactagaaaggagatgctatttcagataacacttgggatgtctgtttagaacttgagatctctgcaaaacaagggtcaactgaaaatacagataaggaaaacagcaaccaaacccacagcagctcttgctatttgaccctatgagtttgaggagatatggaactcaccacttcaggagagacacaccaggacaccttaagcacagtatatacaacatacttgatgctcagagctgcatcaagaggtcttactgccctgagaccaaagttggagaggtagtgaaggaccagctcttcgaggccttggaggacaagacataacgagtagccaggaccctgggaagttaaacaggagagtaacattcactcgttctcaagattgttctaggtggcattgaaaaccatatcagaaggaaaaagaataaaacgtgaaagctattgcagcacaggatggtggtagctggagttagaagccaactgtgatgatgcacacatagctgttgatatctgagaggaattgattctatgacccaatacgaatatcaaaattcagactgataaagtcccttatataaaatggcatttatttgcacatagcccaggtatatcacatagcctgtgaaccttaaaccatctctaaattgtttatgatacttaatgcaaagcaaatgctatgctagcgtcacattattttattgggggagtagtgatgagaaaaactgtatatattcagtgcagatgaaacttatcttcttaaattttcccagcgtgccactggctgaatccatagatttagaatccacgggtccagattactgaatgtgcagggacttgagatcttctgaagtttaatccacagcactttgccatcttaaatgttgaagatcaacatgctgaaaatactctaagtttgagcaactgagctataggggtactgattactatgacaggaaaaagtggggaggccaaggtgggggagagaaagagggttggcagtgggtggccacaaactactgccacccctcagtttgggctctgttaagctggaaatgtctgtgaggtgtgcaggtagggatgtcacatgggcacacagacaagctaagttccaggctgcagctgtattgactgaccctttgctttgagcttgagttcagataaactcttaagttggagaaggaaggaaatgaggatctcctgagctctactaaatctcaaacaccttcatgtcatagatgtttctaaggtgtgcactcatgttccaacactgactttggccatgcctgctgtcttagagttactacatgctatgataaaacaccataaccaaaaacaagtttgagagaaaaggatgtgtttagctttgcttccacatcactgttcaacactgagggaagtcaggacaggaacacacacagggctggaacctggaggctggagctgatgcagaggccatggcaggggtactgcttgctggcttgctcctcgtggcttactcagcctgctttctcatagaacccaggaccacccacccagggatggcaccacccacagtgcaaaacaaaattatagaaacaacaaaataaaatcacacatacacgtctcaatggtttgagcaagtgtacaatttttatgttggtccagggccacattcatatagtgcgccagtctcccttctctggatgagagcaaagcagaaatgagctaaaagaatccatcctccctcagtgtcacagacagacagatagatgctccacacggtagaaatgcctaagatgcttcaagagaaattggagttgaaagacgtcctgatcttgaaagactgcatgttcggggtttaagggggaggaagtgaggggcatccaaaggacaggagaggctgcacttcacagctgtgctaaagactccctctcctccctctgttctctccccagctgcaaagttatttatgccaatttcacaaacatctctctctagtgttaatcacctggagagcatttcaatggcaagagccaaggtccactcttgttaatagtcgggattggaaaacacagaactgtagatttgcttaaaactataaaacaaaccaaaacaactaatgtgacaccttctctcacaagaagcaagaataatataatatctatggtgaaagcaagggtagtgtatgagctttatatttgtttttgttttgttttgttttgttttgttttgtttttaaagaactgtatcaagttctggcaaccttgacaatttaatcgcaaattaaatccaattgtaatgggagaagttgccaacattagatttcacttgctaagcagacgctactaattatgtttttcttttttctttttggttcttaaatagtttttatttgctgcgattataatatagttacatcggttcccccatccctttatgccctgcaaaccctccatatgctcttccttgctctctttcaaattcatggcctctgttttgcagtaagtgtcgttacaggcatatacgcacatgtatatacacatatttctaaatacatacacataacctggctcagtctgtataatgtttctcatatacatttttatacctgaccgtttgagattagataactaggtggtgtgctcatcttccctggggaagactatttcttccactctcagcatttctgagttgcctggagttcttggtgtaggactgaggccttgtggtgcctttccctgtaaaatctactttagcatgtctgttgatgctgtcctccatctgcccatgcttaggcagtctcggtggtgggactttatgggtgtgtcctagaagaagtaaacttactgttcctctggtttacaattgttctggcccctcttctgcaatgacccttgggtttaggaattgttttatagatgaagccattgagactggattccggtcctctgtattttgacgggttgtggttttacgtactgggttccatctcttgcaaagagcggttcctctaataaggggtgggaactacacttatctatgggcataagacaaatatttaaatgtagttaggaatatgcttgcttagtaaagtgaaattgttagttctcctccaaggtccattacatcactagcctgcttgctggctaggtttccagtagcaaacatggtttccctctagttaagacggtcttaagttcaattagagatctattggttatcacctgggtatgtgggcagtgcttcatgtagctcaggctagtttaaactcactgttagctaaggatgagggtcttgtactcctgagactcctggcactacctcctgagtgctaagattatgggcatatgccaccatgccaggcttacttttttttctttttttagacaaactctcactgtgttggcttggctgtcctgaaacttacgttctgaaacatagcctggttatgtagaccaggctggcctagaactcttaggagatctgcctgtttctgccttccatgtgctaggattgaaacatgtactaccactcccatcttctagtacatattttaaatataaatataaaagccttagagagggaaggcctagtgactatttttattgatgaaattaaaaggacagagatgatgggctaaatattcatgtctttattcaagttatttttcagtacaagaaaaattatcaacaagacacataatctctcagagaagcagggaaggagtaggggacaggcaggagggggctgtgattgaaatgtaaagtgaatggataaataaattaataggaaaaaagtcatacaaccaacactctttgggactgaagaagagagaattgctacatcaaagcccccccaaaaacccatcctactttaataactaacattaatatacaactcatagctctactacattccccttccatgatttgcagaagaaattttcagatcatattttcagattaataattatcttttttcataggaatatacttatagtcttctaaaaagaatctgtatttgtgggttttcttagctatgacctgcgatactattaaatttttagggtctgcacttactggggagtattttcataatatagagtctgatccctatcaaaggagtagtttatgtgtctacagacctcacacacccatagacacacacacacacacatgcacacgtacaggcacacagcaaagagtgataagagtttaggcgccattgactttgtccgatttatattttgtttctggagatctttagttgtacgatgtcattttacaaagtaaagttcacatccctccctgattctaagagtttacagagagaataaaatttttgtggatttgggtgattaaatgtaagaattccactcggcaaaagccaggcagtggtggtgcatggctttaattctagactggtaagatggcaggtaaaaaccacttaccacattagcctgaagacctgagttcaatccccagaatccatggaaagccaaaaggagagagccaactccatcagactatcctctgacttccacatgcatatcacggtgtgtgtatactggaaaacacacacacactcacacacaaaatacatacacacaataatgacttattaaaaaattttaaaaacagcagttccttgtaaccttgatttagaactcatatctgctgtaggccactgcctacaggtagtgatttcagattccatagtcaatagcagaaaggaacttgtcacctccccattaatctcagaaccgtttgactggaggaaagaggacaaggacaagaagggccttgtctgctcactgcctgtctctgttgttctcttctccatacctcagagatgtgtcttccaccagcgtcactgcccttccttccaaaggcctggagcacctcaaagaactgatcgcaaaagacacctggactctcaaaaagctcccgctgtcgttgagtttcctccacctcactcgggctgacctctcttacccgagccactgctgcgcttttaagaaccagaagaaaatcagggggtaagtagcaggcacctgggatagccaaggagagcccatgatgggagatggagtcattcatagatttggaaaagaatgtgatttgaagcccaggagggaaagagctgcaagcatccacatgagcaggaaacccatgggcctaactaacggttgtgggggcagatgagaaacaaggccaacattgttggattgctgtggagaaagagggacaataagagatgacaccacagagacaaggttcacttgtctagggtgtatagagtttgaggtgggcttggcttgaatcccaaccccatctgcttctaactgggttatctcagcctacttatttgactactctgagcttttaaggatcaagctcatcacattgccatccataggggggttaagaaggtgaagaggttaaatagaaacgcttggaattgaatggctggaatgtaacaggtaaagcatattaactgtgacatgttatttcactatctggctgtctacgagactgctgaggagagactcattccctcgcactttacactcgcagctgttcctgattcttgctctgacctagttccccttttatgtcttgggtcacctccggttttaacccggccttcattttctatttctgtctcctttagtttctacacaattatccactagatgactctctacactcataattttaaccagctaataaaaaaatcaggacctagtcatagagacagatgcaaattggaaggttgcagagctgggcgagtgggagcatcaaggccatgctaagacatggtgttgcaatcaggtgctgcactaatgctgcttgacactgagtgggaaggatcggggatgaatgcatagatacagtggacccccctgatgggtgtgactccagtaagatagaagaagacttacaccttcccagtcccacatgacgtatctacaacataagccctgtacctaactaaggctcagggatctctgaggacgaacggatggaaagattataagacccagaggaacggagagtctacggagaaactgtgtctcctaggaatgtcaaaagctacatccagggagtctcaccaacatgactacccaaatgtgagaagaacaaggccaataacaatagaaatgtaatgtttgtgtggggaaagcccataggcctcaactctacacagggaaaaacaggtaaccaagcaactctgagagtcggagaaatagcgttcccagggaagaacgcaccaatttgttatccatcaccaaatggtcagccctaaaatacatgcaaacaatactatataggctgggcaggttgtattatgtatttaggaatacacacacacacactgctacaaacaacaacaacaattattgaaaaaagagtcatgaatttaaaagtgagcaaggagggtatatggtagtttggagtgaggaaaggaaagggggaaatgatataattatattataatctcaaaaacaaattggaaaggtcaagtcctatttctatcagatatacctgtgtgctgtggccatttttgcatttgttagcaaatacttaatgaacatctcttacgtgcctggcactatcccggctccatctggcatatgaggtggcttcttgcatgtagcttgtaatctactggaggaagtcgacatagaaagaaaagtcagtcagggttgtgaagggataaaaccacaggcgctgggggggggggcggtacagaggagggggtattcaaggaagccaggaaaaacccctatgaataaaagcagcatatgtttaaattttaataatgtctagaggcggccacgagtttctaggcaaaggaagtgtggagttctggaactcagaataggagtagtgttaacagcaagtgcaaatacagagaaggcacagcccctgctcccagtactaccataacatcttgggaaaggcacttacctattcattcaacactcttgttccattcacaaatggaaccaagtttcacagatctgtccaacatggcacagttagtaacttagccatgctctaagttggttcttgtgtccatccttcttgatcatgactcttcttgaagtgactcaagatgaggagaaataagatcagtgtcgctggtcacagtaagaaaggtgaggtcatataaacagatgtaggaaagatggctcaaagagaggcttgctgccaagtcggatggcctgagtcccacccttgtcgccacggcagagtgggaagaagagatcggactctcacaagttgcccttttgaaattaaaaaattataaacaagtgtcatggaggatttaccagtgtgtgcttagaaaatattaagttacccagaagtaaaatttacctgaaaaggccgtgcctcagacccgagtctaagataagttgcatacgtgtaagataaggacgtgaggagtcctgcttacaagatgaattagaattcagatccaccagaggatgtgtttctttagaactcactcagaaagagcccgacttctcatcagaaaaagcaaaaaagacaatggccttggctgtcacttgataagacagcaaagctggtttgtttaacagagagccagtatgtgtgacactcagtgtaatctaaaagataacccaaaaaacttcagctatgctttcttgctataaaacctacctaatcgctcagaaaatgtagcttggcacgggagcctaaaaagccacctgcacatgaaagcatatgtaagattcccccgttacacatcaagctggcaggctgtggaggatttctgttggtggctggaatccaacgggcctagctggactctggatgtatgatgtttttcctaaggggttctcattaatttttgaagtgcctggagtgacttctgattagcaaagtttaattctgccacgttgaccttcatgccacactggtgcacgggcacataataaattaagtaaccagtttttaatgatgtagtcaggcctgacgagaccctgcagaattcatcacaccatgaatatcaaaataaataacttgtatatcttcccaagggtcaaggggatcaagggtgaactttaagcaatcggtgactcgtctctgctaccttgcagaatcctggagtctttgatgtgtaatgagagcagtatccggaaccttcgtcaaaggaaatcagtgaacatcttgaggggtcccatctaccaggaatatgaagaagatccgggtgacaacagtgttgggtacaaacaaaactccaagttccaggagagcccaagcaactctcactattacgtcttctttgaagaacaagaggatgaggtcgttggtttcggccaagagctcaaaaatcctcaggaagagactctccaagccttcgagagccactatgactacacggtgtgtggggacaacgaggacatggtgtgtacccccaagtcggacgagtttaacccctgtgaagatatcatgggctacaggttcctgagaatcgtggtgtggtttgtcagtctgctggctctcctgggcaatatcttcgtcctgctcattctgctaaccagccactacaaattgaccgtgccgcggttcctcatgtgcaacttggcctttgcagatttctgcatgggggtatacctgcttctcattgcctctgtagacctgtacacacactctgagtactacaaccacgccatcgactggcagacgggccctgggtgcaacacggctggcttcttcactgttttcgccagtgagttatcagtgtacacactgacggtcatcaccctggagcgatggtacgccatcaccttcgccatgcgcctggataggaagatccgcctcaggcacgcgtacaccatcatggctgggggctgggtttcctgcttccttctcgccctgctcccgatggtgggaatcagcagctatgccaaggtcagcatctgcctgccaatggacaccgacacccctcttgcactcgcatacattgtcctcgttctgctgctcaatgttgttgcctttgttgtcgtctgttcctgctatgtgaagatctacatcacggtccgaaatccccagtacaaccctcgagataaagacaccaagattgccaagaggatggctgtgttgatcttcactgacttcatgtgcatggcgcccatctccttctatgcgctgtcggcacttatgaacaagcctctaatcactgttactaactccaaaatcttgttggttctcttctaccccctcaactcctgtgccaatccgtttctctatgctattttcaccaaggccttccagagggacgtgttcatcctgctcagcaagtttggcatctgcaaacgccaggcccaggcctatcagggtcagagagtctgtcccaacaatagcactggtattcagatccaaaagattccccaggacacgaggcagagtctccccaacatgcaagatacctatgaactgcttggaaactcccagctagctccaaaactgcagggacaaatctcagaagagtataagcaaacagccttgtaaaggaaaggctacgctagtcacagtgagacttacaaaaggctggtttcttgaacatgcgttccagtcccgtgacatgtgaacacataggttcatgcaggtgatgattcatagggtcagagttcatctctagaaagtattgcctctaagaaggaagagacgctatcagcatatctgagtcctaggtgatatgacaatcgcctatgctcgctgggagatttgcttgttgcttgtctatgatgccatgcaacatgttccacagacaccagttgaaccattcccacatcttgcttctccattttatgtagtgttttatactaaagactcaacaactggccagtgttcatcatactccatattagcacccctgaaagaaccaaagaaatgtttttattccttaaaaataaaatgccaaggtaaaatctggactgttaataaaaaaagattaaataaaattaaataaataaataaaatgccacacttggaaggtggaggtaggggaatccagttcatacttagccacatagagaattccaagccaacttgtgctacctgaagctccacctcaagctaccaaaagaagcctggaaagccaaacatatagatgtcacataattgcttttattaaactgaaaaaaagagcacgtctagttttgagaggtttttctttgtttttcttccttagactctgaatcaatcatcaccaggctctgcctgccgtgacccagctgttacacgctgactggagaaactgccaaggtttcagcttttgtggctgagcaaacttaagaattatcttctcatataaaacatgagctccgggagagatttctaaggaccacatgggaatgaggacagggcacacttggccacgtgttgaataagacaactatataccagttaacttgtcgggctttgagcaagtctctggacctctaaattctgtagaaatggggggatttgatgccctcttccattaaaaaacaaaaacaaaaaaacctaggtatatatccccctcaaaagatatgtgtgacaaagacaaagaaaacactacttaagtagactcggttttttctaccttgtgacgctgctgtctacttcttttaggaaccaggacatgtgacccaagatgctttttctttatttcattctgatcatcgtgtctgaaccaaaagttctattgagtgactgactatgtggagccagatcctaactattcatctaaattattgtatctatactactgtcaagtccaagacatactggaatttatataaactgttaataatacagcccagctcatgtggtgcacgcctttaatttcagcactggggaggcagaggcaggtagatctctgaatttgaggctagcctggcctaagacagccaagtgtacacagagaaaccctgtttcaaagaaaaaaacaaaacaaaatagactactaatagagttaatatgtgactatgtaggctcactttcaaacatttaactcgttcttcttcttttttttaagctctcctgggctcacaccacactaacactgtcaagagagaaatctctttactgacactgccagtcccttctaaccctgccagtcactgacataaaacatgtgtgtcccaagagttgccttgcttcaaacaggaactgcatctccaggtgtaccctccaggtagccagtctggtcaggctctttaccacattgttacggagtccccaagcagatctggcatgctcttctcagtgctcatgagccaaagcaggaactataaggggctcgccactttcagcctatgaagtagggtttatgggtcacctgacatggctcctatctgcctggcctgggactctgtcacggtctcacaagcaccggcttccccagcagttcacgtgtaactactgaaattaaataactgtgctaccctgtg

SEQ ID NO: 83 - DNA, 190137 bp, Pan troglodytes
  misc_feature (20391)..(20511): n is a, c, g, or t
  misc_feature (87105)..(87114): n is a, c, g, or t
  misc_feature (88427)..(89017): n is a, c, g, or t
  misc_feature (111179)..(111481): n is a, c, g, or t
  misc_feature (125014)..(125637): n is a, c, g, or t
  misc_feature (161905)..(163296): n is a, c, g, or t
  misc_feature (165782)..(166161): n is a, c, g, or t
  misc_feature (174399)..(174731): n is a, c, g, or t
actggacccattaagggaacccggaattatttctgccattcccgattattcccagcagatggccccaaagttcagttcctgaattgcctcggggagccgcgggctgcaacgtgaggcggccgctgccagtcgactcaagcgccggagtggcccctgcagttggatagcaacgagaatcctccaggggtgcagggcgacggcttcggccgcaccgcgggctagccagggctgcgtgcccgcctctgaccctcagcagaggtgtctctggccaggaggagctgaagttctgcaggacattggtccgcccgcggacagtccactccgcggggactttctctggataaggagtgcgtgcgagtggctcccaggcagacagggtgtctagaaggctacacgcgagggaaggtggctccttggatttaaagaggaggaaaggagggggcatctaaactaggctttgaagagaactaatgggaggggcgcccgggggaggggggcgggctggaaaacagaggggacagccaggactggtgttgggtgtcagggaacagacggagcggactgcgtgggtccagccaaggaaagtgaagcaagcaggcttgtttgggtcaaggttgcctagggaagcggagcacttaagtgcctctttttccccttctccagcctcttccacagtggtgaggtcacagccccttggagccctccctcttcccacccctcccgctcccgggtctcctttggcctggggtaacccgaggtgcagagctgagaatgaggcgatttcggaggatggagaaatagccccgagtcccgtggaaaatgaggccggcggacttgctgcagctggtgctgctgctcgacctgcccagggacctgggcggaatggggtgttcgtctccaccctgcgagtgccatcaggaggaggacttcagagtcacctgcaaggatattcaacgcatccccagcttaccgcccagtacgcagactctgtgagtacccgggagagatcagggtaggacccagagaccaagggcatctgcagaggtggcccgaagtgcacaaaagcagctcaataacagcccgaagtagtgtgtgtgagtgtgtgtgtgagtgaatgtctgtgtgtgtagatgtgtgtgtgtgctaaaaacttaatcgcccacacttgggaaggtatcattgttgacatcctcattcccaacacagaaaaatgttacaaaactttggtgtacgatgaccgtgagagctgttctttccaacaagctgctattcagcactttgcctaaccctggttgaatctgttttatttgaattaataaggataatggcatctcaggaactgacctttttgatcttaccttgggtaataaaaaattgcaaaaatatgtatttctcctttttgtttctcttgatgggaggttatcttagcagttctgctgattcatccaattgttgacaaaggtttaagcaggggccctttttaaaatgaactatctatacagtatctgtaagttacttactcaaatgtgaactgccagtgaaatagtacgtccagaaccctgctttgtgatagaagtataaagaaatgaaatttcataaaagtatagtacatttatctgcatgttaaatgttaccagattagaaacctgatgttaaataagattatacacacacaacctgtttcttaacagcaatttaaatcagtgatcattgaaactgtagacaaaaccaagggaataaagtctgtcttgattggttaaaaatagaaagaaaggacagtaaaacaacctaggctggttaaatccagttaagataaaaaaatgcaggttattaaagaaaatgttgatagatgaaaagaaatgggaaagttgcacctctagattttctcaagaatttagctcataaagactatttaacagtagatgaatatttcagcacagaaatatatttctgtgctcagagataccctagtgtcttagcacacctgaattaattagttcaataacctccaaacagtgtagtagtcattctccatgctgccaccacagaataaaatgtgtaaaaggtataatggcctcttgattacacctctacatgggttgcttgtcacctctagaataaaattcttttgtgcagcctaccagatctttcaagacctagttaagtctttccaacctcattgctcctaatttctctaacttccccctcctgctgagaagaacttctggcgcctccccaaaggtccctgctgttacagctgcccttgcctttcttcccactttctggcccctctgcctaaagcacatttcccccatttcttcacccagctaatgcctactcccagatccagatcctggatcaaccctgcaggaagcttctcctgacccatgacctttaggctgggtaagctataccccccttcccaacagcgttctgtgcatgaacctaaccctagcccttagacattgtctactttcttgtaacttgttatttatttgcatgtccacccaagcaggacacaagcttctctaacatagggacactgccattcaaccctgaattcctgaaaccctggaactacttagacactcaaaaaaaaaaaaaaaaaaaaaaaagcttaagtgaataaataaacaaatgaatatgccaggtctctgaatgtccactgtatgttggggagaaagaaatccaaagacatcacttcttcagagacttctttaacagtggcagaaattcaagtcattgaagagagatgtggctctgacagtgaaaaggaactcgtagacatcctgtttaaaattccaccaaaagttgagaaagaaagggtaatggagaatgagcaatggaacaggagtcaggaaaccagcattctcttcagcccttctttactaaccatgaaattgtgtaagatgactgatttggaaggagccaaatttccttctgggtaaaagagaatgttcaactaggtgctttctaggtgatgacatgatgctgatgagaatagtctgagggaaggcactgaatcacaagaaaaagacataaagacagtggcaaggaggatctgcccttgagaataatggagagggaggtagtatgtcctgaagaataaagttattctgagatcgaaaagagaaacctgatgaaaagtgtgggtaaaacaaaatggtagtctcctttgaacaatggctactaccatctgcaacagtagaaaaatgatttttaaatcttttgggggcggtagaactcttctgttgaaggaaagtatatgagagaagtaaaacatgtaaagctaacaattatattttgtttacttacgggggggagtcctgttctcagcactttgcatgaactcacgcagtgaatcctcaccaaatccaattaagtagatgatgttattatcctcactttatagatgaggaccttgaggcacaaaaataaaatgaagtaatttgctcaatgttgcacagcttgtaagtggtgaagtcaggatttgaatatcatatcatcaactatggagcctgcacccttaagccaccactctcagatgagaagtgtgtctcaccataccagtgttcccctgatggtcataggctttggagaaaaaagtctgaaaacaagtcacattcaataaaccgactgataacctcgggggctattcatcagatgcaagcactgagaaagcaggaggttagcagggaaaggaaagaagaaggaaggaagaaagagagagtggaagagaggcaaggaggacaagaaagactaagttagtctttcttgacaagaaaatctagatctttttttacatctttctagacaagaaagatctaagttatggaaggtattccttgctgaaataaaccaagtttttgtcattaaaaagccgttctgggtggtgacctctttttggaatctacttaaattatacaggatctaccactgaggcatgttctctcacaagttttatattattcagagtgtacctctttttaaagtttttgaagagcttacactggtttaaaatgtaaggtattttgttcttgtagagttatttgcattacttctgcaaccttcatcaagatgctgtataaccacttcttagacattttacaaattatgatggtgccgagaacaactctttctaaactttatcttctactcatagattattgttctgaaaggtaaacagctctcttgccctactacccatatcccagccccgtggtcttatggatgcaggggagagagttacggactgtggccctcactgaagaagtgatgctgtatcttttcctcactcctcccctccagaagggtatgatgctttacctgagtggaagatgagggagagctgggatccctacttcccccactgccagtggaacattctagaatctttgatgtgtaggtagtttgaaaaaaatcactctcttccattgaaaattactgatttaaggaaacttaaatgaagcaagagaataaaattaaaaatttaaatgttggcatataattatagatcatatatctcaaaaccaaggataacaagattgacccatcaccttctcttactcagaaagttgccatttgttgcctctgtgcatgagaagatccttccttctctgaataaggaggtagaaaggatttgacaaccattctgcaccattctatgtatttgtgtggattcttcctccagaaaatgctggcacgccttactatgttgttttaaccctgctttcagtttcattatgacagtaactgctacctctgccttctccaaccccactgccatctgtggtcttgggtttcgacgaagtaagtggtttggacacctgtgtgccttcagatatgtttctgaaggagctgttgttttcaggttctgtttttactcatttgcattctgcatctgtggctctaattgagggactctcctactgtttactaaactgaagacaatcattcatcatctttggcatttgtaccctgtgttccatttgtgctgttatttactcagtatttttaagttgactcgcttctctaactgaaatttatttaggaagattacaagtggaaaattagcatgacttggtacaaataagaggtaaccagaaaactaaagacagcaaaaacaaaaatataattaaattctagctatagactattgtctgtgaatacactgagcctacagctgccttctctttgttaaaaaggaagcgaagtaagtgttaataagtattaaagagataacaatctggcacggtgtccttggtagtatcgaaaggatggaaagacaatacaaaaaggaattactttctcactgtgtgattcactgttatttaatgccaggtgggcactccacctaaaataatctcatgtacctccaagtcatctttgttccacacttaaagaaatgtggatgttttgtatatttcacaatggttttagtcacaatcagtggttgtaatctgaataacaattgtttccaagctaaagagaagctcctgcttcaacacccacgtgctccccaaacacagccccacacatataaaggtgacttcatttcatatatccaggctctgtgaattattcttttccattctctctctcctctcccatacatatgaaacactgttctaagaggagtgaagaattctgacctgaaagttaaagggatttgatttattcacttggaatgaacataataatgaacaataaaatgtgtccatcatatatatatatgagagagaatatatatagagagggaatatatctgtatacctatatgtatatatatttagacagatatatatgtgtgtatttaaatcagtcaaggtttctgatgataagtaacagaaaaccaactctgtttaggttaaggaagaaaaaaaatattttgaaagaacatgtaatttacagaattactgtaggaccaggctttgaaaataggccaaggcctactgtgggcaaggaactggagccacagtgaatcatctgtttaggacaattccatgggcaatatagaaaccacagccactggacatctgcggtcttgtagctgccagactgtctatgtgctgccatcagtaatttcccaactgtccctgtctctttaaatatcctacctgggagtggtatcctgtatgggagcatttgattggctggcaagccatagctgctggaggtaggaagaggaaggaggtcacccgcccacttttggcgtctgaaataggagacgcagaactgggtccttctaatattccacacaacaggggattccccactgaagaggggccatatgccctttacattgctcatcacttccttcattctgcaaatctttactaaggactaactatatcccagacactgtgtcacactctggacttaatggagaacaccaccaacatgtccctgtctgcagggatcttacagtctagtgtgggagctgcatattaatcaaataattacataaacacagagttataattgtataagtgtgcttgagtatgctcttagtaggggtgagggatacttacttaaactgcagttcagggaaggctttgagctacctcctgaagaaccagtaggagttgagtgtaagaagtttcagtggagcaggtagaaggtggagatgtggtgttccaagaactttgaagaattctgacctgaaagctgaaggggtttgatttattcacttgggatgaacatattaatggacaataaaatttgttactactcccttcataactcagtacaggttgaggtgaattctgatgtccttgggagcagtttctatgcccacacaaaaaaaacagttaatgggggtagctggcttcgtaaattaatatttggtttgttaaagaaataaatgtaaaacctagttctttattgagttttctatgtatttattattttgtttggaaatctaatcataacaattactttgaggagtattttatcatttaatattttaataactgatttcccatatagtttaatcaaataataaataatttaaatgaaaacaaatttaatgtattttattttaaagtacttgaatgcttgatgaaaccttcccaatccttagaaaatttgaaaacatctattatattaaactttataagtaccaggaatcctatgtttttagattgccaaactctggagtgagatcctccgggttgaatgccttggtctgctatttcctaaatatgctttgggaacattgcttagttcctctgggcctcagtttctccatctataaaaaaagagtaataatagtccctgactcaccagattcctgggtggtatgaatgagttaatactgtcaacagataattttcaaagaaaggaaaaattgtaactctcatacacctataaattgaacacatgttaaagattttaatgaactcattgatgagtgtatatgaattgcctaagattgccataacaaagtaccacaaactgagtggcttaaaacaacagaaatttactctctcacagttctggaagctaaaagttggaaatcaaggtattggcagggtcatgcttcctctgaaggctcttgggacaaatcctttctggttcttcctaggggctggttgctgttgccaatccatggcattccctgcatcactccaattattggttttaggctcaccctcattcactatggactcaacttaactcattacatctacaaacatcgtatttccaagtaaaatcacattttgtggttccaggtagatatgaattttgggggcatgctttaacccaccataatgaagaacctggtaagatattacaactggcttaaagggtagcccaccaactagacatatttatagattaggaatatcagagtgactatgcagatggaggccaaactagcttcttccctagtcggggagggaagttcatagaagctcttccatacgggacagaatttacaatccgtagacaaaattgtttgcgttgctacaattatctacaatctagaaaggtgtaaaataattcccatagaatcagactgagaaacttggaaaggtgtgctctagtcaatacacagcttttcattgaaacacatttttccccagtaatacatgcaaaattatagaaaagttaccacctcccagtgagcactatacaagtaaacttattaaaacctctaatttccttttcaacttaaatcacaagtcaaaataaattactcaattatacattttaaattggaatagcaagaccaatctattagatatcccaactaggtcaacaacttctgttaatacaaatactcaaaataccaaatatatattgattattcttaaactcaacacaaacatattaatactatgggtctgatttagattctcatttctattgttaactctaaattttcccaagctaaaaaatgtttattaattttaaaaattgatcttcatcccctaatgaactccaggttctttatggaaccatccactggtttccaggttccatatagttagggttgccctatccaaatggaccctcctcttacacctgtaaggcagaaaatatcttttctttacccatcacatggtgcatggctgagaccctacaacaataaaaaacagattgacaagaaaaaaacattaaacaactattaaatataagttttacatgacacaggaggcttcagtaataaagacccaaaggaacagagaaaactgtatctttttatggacagtcatacggattggaggacaaaaggatatgatcgaatggtaataaactgtggtctgtggggcagatcttagcaagtcttatttgttcaaattcatcttggtgtctttgtgtcttcattccttttctcctggtgtagggagagcccctctgaaatgagggtcttaagacctactttagacgaagaccagagaattgtctgatgacctgattcaggggagaagggcaggaaaaagtcggagagaccttctgtttctgttgttttctcaaatgccaaggtgtcacatttggggatagaatgtcttgaaccccattacatctgtcattcaagtgtagttaatagcattcctttcactctcaaaggtgtcccaatttgggggataaatttctaatactaatagatcttcctattagaccattaagtccagaggcccgtgggacatgctcagccttgtgtttcattgccgtaggtgggagtctatcacttaaaagaaggttggtctcagccaggtggggtggctcacgcctgtaatctcagcactttgagaggcggagcgggggcggatcacaaggtcaggagatcgagaccatcctggttaacacggtgaaaccccgtgtttaaaagtccaacctcaacaatcagatcagttttgatgaggccaagaccattcagacatgatatcagaggcctagatccagaatgtccagttattttcatctgtgtgaacaaattagctatcctggggcctaagtctattttcttagatcacctctgatgaagtagtaagcatagaaaactaattcgtaatacataaaacatattggtaaatgaattagttttgtctgaatttatcagtcaatttactagagtagtagttttttgtccagagctgagaaattaagttgaattgatctatttgattatttcagtgtttcctggttatacaaagtgtgtttgttacccttcagactaaggtttattagacaaaagttcatgggcctccaggagttcgtggttgcgctcttaggaatctgtggttgtgtgaaaatttgtccccatcagtgcatttctgagactctataactttccttagatcttcaaaggtgtccttgacccctcacaagttaagaaattctgctttggaataatttggcattttgtaagtgtactcactatgactcaatctttttattatattacaaacaaccctaacagacatattttaacaataaatgaaaatcgcctgacctttgtgtggcaagctgtcacagttagttactacttgagactgtcattttgacagttactactgttactacttgagaccgtcactaggacagttactactgttactacttgagaccgtcattgtgagaatgaacaaaggaatgaacgtagaaatgaaaaagtaagacaaaagaaactgttttaaagaaggtgtccaggggaagaagaagagagctccctgcttctagtgagcaaaggcagcccctgagcttccacagccctttgtatttattgggtagcaagggcagggaggaggaggtaacgattggtcggctgcttaattgatcatgggttcatattgttactaacaggcttcagatgtacctaattacaagaaacactgcgcttggggtgtgactgccctcagcattccttctgggtggaggacgcacttttgtcagtttgccaacattctgcatttatgagaacagtttgctgtttactcatagagcctccagtggtatagtgagttgatcacgaccctcactctttcagcctgcaacacctttgaatgtcatggttttccttccgaacatgttattgtggtgattactttcttcatggctcacacttagcctgtcccttgataggctcttcacacagaagttcactgaatgttgccactttttcaagtcaatagttgacagattttttcaagtttctaatgcctcctacatgatggtaaattcttcatactgactctgtttccatttttactgaagctggtcaacatacttaattactctctttcattacattaattaaaaaatagcatttgaaaattttaagaatgagcaaaatggtcccatttgttcaaaattatagattgagttttaaagtgttccatttagatatcagaccctacttacttggcttcatttctgtatgaacctttaagaacatttagggtattccagaaattttcaaaataattttttaattacaaagttggcacttgtgatttttaagacataaatattgttctcttatatgtggtgacaggtatatgtgctctggatttttatagcacagtcccattgaaaagactgccatcagaatgtaccagaaattcaaatatttcatcatccttttaatctaaacttcccacatcacttgcgcacctggaaagagcttccttatgtccaaatttttctttcagaaaacatgatctctgtatttatatgacacatgaagcttttggcttatattttgtaggcattaacttaatcttacccttgcctgtgtgttctcataattatgcaactccagcgaggagactgaaattgtttcctcttattgccaggtactgtcactttatattttgttatttcaatctttttttaagccaagaaactagaaggctacttttaggaaagggctctgtgcatgaaaataaagaggatctaaggacgggcataaatgagatactcttccatgagaaagtctttagtgggctttgagatggcagtatttccatctcaacacccttggcagttatttctgggtttgtggacatggtccaaagatttgagatgaccagaaatactacctctagacaggtggcattttattgtaaaatgttcttccttctttccttttttatattttaaataaatatgtattgatcacctatcatacactagtactattctaggcattgatatataataaacgacctcattgattttacatcataacaggagaaaatagcaaaaaaaataaaaatttaaaaatttaaaaaagtaaaacagagaatgtcagatggtgaaaagtataatggagaaatataaatgaaggaagagggagaaggagtactagaagttgcattttaaatagtcagcaaggtgtcttagtttgggctcctctaacagaataccacagactgagtggcttacacaataaccatttacttctcacagttctggagactggaagtccaagatcagggtgccagcagatctgttgtcttgtgagggctgcttcttggtttgcacttgaccaccttctcattgtatcttcacatagcaaaaagccaagctcacctctcttgtgttttttattataagggcactaatttcgtcataaaggttccacactcataaacgaatttcctcccaaaagccccatcttctaatactatcacatcagagattaggatttcagcatatgaatttgggggacacacaaacattcagtccataacagaagccctcactgagaaaatgacatttgaataaggacctgaagaagctaaaaaaggaatccaggctaatatctggaggagaaaaaaaaatttatatatatatatatatatgtatgtgtatatatatatatatatgcttatttttggaatgagataagaagctattaaggattttgagccacacacacacacaagcaagacctgacttacatatttttatttttttttgagacagagtctcactctgttgcccaggctacagtgcagtggtgtgatctcgactctctgcaacctgcacctccggattcaagcagttctcctgcctcagcctccctagaagctgggattacaagcatgtgccaccatacctggattatttttgtatttttagtatagatgggttttcaccatgttggtcaggctgatctcgaactcctgacctcaggggatctggccgcctcggcctcccaaaatgctgggattacaagcgtaagccaccccgcccggccctgacctgacttacattttagtaggatcaccctagctactacgtttcttaatagggtgagagatgatactggcttgaaccagcttaattgcagggaatgtggtaagaaatttcctgggcttattttggaggtgaatccaacaggattttctagcggactatgtggactttgagtaaaagagaggagtcagtgatatcttagtctgaattctccagaaagcagagcccatgtgagaattcttattggggagtatgatcccaggagcagaaggtaggatggggaagtgaagcagggagagagggagagtttgctgctgctagaaacaaatggttgctgaaacccctgagaccacctgagaattcagatgacttgcatctcaggacccttgctttaggaaggaggaaaggtaaaacacctatccaccagttcttggctcccatgagtcagggatttaattctactgaccttccaggtttcctgtgcctgggtgatgaaagaatttcctgatattaacaaaaaagtccccgggtgggagatgagaggtgtgtggtacagggctgagatgcagtactgtcgagttgtacctgcctgaagctagtcagagctcatacagaactggtagctgcagcagggctagcataagaggcaagctgagagaatctaaaatgatgtaaaacaggtacccagggttggttagcctttgcacaactcagacctgcccaagcttttcattatgtctagctcccataataaaatatagggcctccgattttgtaagaatgagatgtccttactttttttttttttattcttacaagaaaggggaatacaagccccatcttccacagattccttcaagatgcagtccttgcaaagacataatgcaagagggtttgggaaataaactagtctgccctgctgcagctgatcttaaggatgccattgatagtccttatctctctttgtctccaatcctagatttgtctcacccttgcccagcactctgactggttgagttgattgcctgatggaaagacccagacttcagctccaagggttctgaaagcttagttgccttgttcttgtcatacatagctgctgtattttctccttcaccattatctgtgggctcaaaagaaccaagagatgccccagtgaattccctgcattctagacacactcctcactcttcctaatgtgtagcagctgccctagcttctcatggtaaagagggcctaatatttctcaatagggaaactcctttatttacctatttgtcctctagcatgagaagctcaaatgaccaggtggtcattatagtatcaacctccgtgtattggaggaggaagaagtaatctttctcctcaggaactagtaccattaattgggcaggaatacagacaggaagctcaaaatttgaatgttaggttactagggtgatggtgagatgagccaattctatcattgcccccgggttttcagacatgtgtatcctagctacatagaacacaatagcatatgttggctattgattcagctcatatcctttcttaggtcagatccccaatcctgcagggctttgtccccaagatggcaccttagctgagtctttaattcattccaccattctcgtaggcagtctggttcttcatgacagggcacatagtgagactagtggatatagtgttcatatgccctttgttgcaccttctctgccatgaaatgcatcccttggttgaggcaatgctgtacacgttttcgtactggtagatcaggtattttataaacccttaaatggtggtgccggtggaggcattgaagtcagagaaggccaaatccaaagtaatcatgaggttttaaatgaattactatttcttacagggtggaaatggtccagtataatcaaactgccaccaaatgtctggctgttctctttaaagaaatgtgccttaccaagggtgcagcaatgggctatactgctgaaaggttggtcatttacaggagaagtatcttgattagacttgatgaaaaggagcccaagccattgggtccatgcttggcttccattcctgtcaccatgaccacttcattcatgttcatttctccaaaactggatggcacttataaaatgagtcatctagtctacttgggtgttgagatccaccgcaaaccagagtaatcagtggatactctctgatgagcattaacgtgagacacaaaggtccacagaatttgttcccactcccatacatatagccatatttgtttcctagactttcttgttctctgttttccaatagtattctttctaggccagtggtcaaccaggtaaattacttgctacttcttggtattccatgtatacccttgccacggttctttctcccttcatacaaaaagaatgattgctataatgctcacagatgaactgattgtgaagatttcccttcaccactatcctttagggccacccttgagtggggctgtaatgcagcagtagttcattttttttggctggcattagcttgtgccaatctgtaaagcagacaccaacctacgaactccatcaagtggtcatatggagctctccatgaagccaatttcagtgagagtgcagcagaaataagtgaagtgggagtctaggccacctattcatgaatttaccttccctttctagactttcttgatccagaatgtaaaatttctatcataaaatcaattgctgctgtgctcaccttattttatgtagtagaactggcaatacccaattcacaatgggcagctgtagtcacagagtcacttagtgtcccattgaagagatctcagtctctactagggcagaatagcatgtcaggaattattttcctcataaagggtatttctgtccttcagaaggcagatccttgctccaaaactttaagagcctgagctttcattctcttcttgggacctgctggcgagtccacagaatatccttgtccaggatggatatctgtagtgttgtaagacctgctgggctgggctgtgtggcccacatggcagggaagctggcatttcagcctgaatctgttatagactcttgtaggtcctacctgaaactggcagccttctgagttatctgataaaagggaaaatgggttacactgctgccaaaagccaagacgcccagcaagtgctgtacttctttgtaaaaggtagaaagggcaagatacaactatatgtcctataccttagaagggatttttttgtgagacagggtctcactctgtcacccagactgcagtgcagcagtagttcattttttggctggcattagcttggcttatggcaactgcctccaaggcccaagcaattaccctgcctcagcctcccaagtagctgggattacaggcacatgccactactgcccggctaatttttgtatttttagtagagacgggtggccaggttggtcttgaactcctgacctcaaatgacccacccacctcggcctcccaaagtgctgggattacaagcctgagccaccatacccggccagaagggattttttagaatgccacagactaagcatgttgctaatggaagaggtccctgaatctttgtgggatttatctgctgcccccaaccttcagatttcttactagactagctaggcttctttctactttttgcccaccaactctaattagcatatcatcaggtagcagaccagtatgatgatgtgcgtgatgtccagattatccgtccccacaaactcttatgaaatggaaccccttgagcaaagcagtgaattggtattgctattgttcctagataaaggtttactacttttgattctctctattgataggaatcaagaagagaacacattcaccagattgataatcacatataaagtgctacaggctgtgctgatgtgttccagtgaagacatatctggcacagcagctatgatagaacctacctattggttaagttgttaaaatgcattgtcattcaccttaatctatttgtttggggtttttgttggttttgtttcttacagggggcagataggtgaattgaaaggatatgaagcgccaccattctgcatcctttaagtctttcaagttgacactaatatctgcaatttatcctgggacatactcctatcagtataagctcaaaccttgtatccaatgatcttcaagaagtcttggatttctgtttaccagttgacagttactttggcaattggccacaggtcccttttaggaatgattgggggacagtcaccaataatacttgtagtggtatacactttccctacacttccctagggggatccagcaacacttttaatcaatgaattcctggttcctgagacattaaagttttaaaatatgtgcctcttaagatgatgaaatatagtaacttgatgtggttactatacacagtactagagggaagaattttccataacacaaatgtttagatttaaattcatgccttgaagccagataaatgaagtataagctataattacaaaacacctagttcttcagtgtttggatttatgaaaattgccatgattgttatctattgtgagttattaatccaagttacttttattacattttaacagttttagctataacataaattccatgggtttttgtttttgttttttgtactaccttaaaaaaacctatcattgttctgtggggtttttttgctcagttatgtgtttgtatcagctttatgcccagacccatactgtatgtcttcacatataatatctcagtgctcacagtggtcttccttgggaggtgtttgactctcatttacatgcaaaactgagacccagaaatgtcatcttttttgactcttatgtcacagctggtaagtgaaagagtcagaattcaaattcatgtctcctaactctaaacccaaagctccttctactattccatagctatcttcctaaatctggtctattttctctccctctccctcccctcctcctctctcagttgatgtgaaattcacacaatataaaattaaccattttcaagtataactaccattcagtggcatttagtacattcacaatagtgtacagccagcacctgtatctagttccaaaatattttcatcatctcaaaggggagctcgtgctgattaagcagtcattccccattccccactcctcccagcccctggaaaccaggaatctgctctccgtccacatgggtctacctattctggatattttgggtaaatggaatcctaccatatgtgacctttgtatctgacttctttcacttagcataatgctttcaagtgtcatctacattgtagggtgacaaagagtatgggcaatcagacaagtgacccaaagggaaaacagatgtaaacaggcctggctaaagcttgcagcaatttttggacaggttcgtttctaacacatcaatgtagatagcagccccattccatgctgtaataccttataccttagatacaaaaatctgaacatcaaaaaaatctgcgtacttggccgggcgctgtggctcacgcctgtaatcccagcactttgggaggccgaggcgggcggatcaagaggtcaggagatcgagaccatcctggctaacacagtgaaaccccgtctctactaaaaatacaaaaaattagccgggctaggtggcgggtgcctatagtcccagctactcgggaggctgaggcaggagaatggcgtgaaccccggggggcggagcctgcagtgagccgagatcgcgccactgcactcccgcccgggcgacagcgagactccgtctcaaaaaacacatctgtgtacttattctcagaggcttagagctaccaaacatactttcccgtgtcgaaaggttttaagagttcccatcttgggaaggaggctgtttctagccagttggcagaggaacactatgcatttatcccttctggatctcatggcaatcttaggcaacatttctagaaagcggcgacttaatagcaatgcatgaagccattattcataactcttttataagtcaatattcatgcaaagggcttttctctgttataaggaagctgaagaacaattctaacaatatcctatttctatcgatgtttcttataataatattggcttctataccttttttttaaatctccattaacaaatataaccaatgtgccaaggaagaaaatttgctgtgaattggaaaatgtttaaatgagagacataaattattcttcaccttatgtttaccagagcttacttctcggttatttttccccaacctgctttagatgtggaggcagaagaggtgtggtataattcttatctcccaccatcgccctgggtgggagattctatttactcaattcacagggtgaacaaactagtaagatctgtaaaatctgctctccccacaatgagtgattatacggagctcatgagctaatgctggtagcatgatgtaacagaatacgccttgatcacaggttagctattactaatgcggtggtaggtctgagagcctgtcagatgtggcctggtttaaccctcggtgtgagcattatatcaatttatggagggcaagcttccatgcagggaccatccagcagctgtttggcatcagggttgcacagctttattaggaagagcaacacttgtctacttttcaaaggggacattttaaagacttccaagagttcttatcttcttccagatatattcattcccagtagggtaaagggactgaaattctaactagggggtctctgtgccaatagagcacataaatctgtaagaaggatttatctgttctatgtcagagtttggctgaaaatcctgttagtactgccaaaccctccagatgcccatatttaatgcttggttggccttatgtagcataaccaaattgccatttcacaaccaccctcaatccctggaatctgaaacaacaaagccagaagctctgaaatgtgctttacgaagcatgaaagaatcttttaaggctctgtctgattcagttctgtgtgatgatagaaggtctaatgtacttgtgaaggattccttttactcataagaaacttggcactttacagaaagtatgtatttcatgaccaaaaaaatagggtggcttggagggattgtgctttctttttgtattgtatccaatatgttcagtatcaacagcagcaaaatagagaggaaaaatatctggtacaaagctatgtcagctaaaagtcatggtgacgagcagaggacagttttccactgaattcagggaaattattgcgtgactatgtgaaaggactacttacacagtaagagtggtaagtagaaatggacagtggaagtcaggagaccttccataagtcctaagaatcttagcaaggcacttaatcattctgtgtcttaccttttgtatctattaaaggaaaaccataagatggtcatgtcctatttcagagaactgttaggaagaccaaggacatcattgttcaaatgttcatggagctcttcctattcggggacaatcttccccattcagcagagtaagactatggcaggttattgtttgtcacatattttgaagaacacaaatgtattatacagggattctgaaggaacttgactattaaaacaaagcaacacaaatgaagtatttcannnnnnnnnnnnnnnnnnnnnnnnnnnnnnnnnnnnnnnnnnnnnnnnnnnnnnnnnnnnnnnnnnnnnnnnnnnnnnnnnnnnnnnnnnnnnnnnnnnnnnnnnnnnnnnnnnnnnnnnngttcataaggagctttctcatgttgctcttctgatttttttactccccattcaccatttagcttgggtgcaatctggcttttgcccccattacttaattgaaaaaggcgatgccaaaatcatattaacaacctatattgcaaaatcaaaaggacattttagatcctttcctaagttgaatgctcagtagcttttgtcactgctgactgcttcccttggttttctccacatcatactccttgattgcctggtgccttacttcaggtcttctgagcagcacaggaggcagggctgctgtttgcataatggggaggataccgagctgcttaggtgtgccaactgcactccttgcagcttaacagcaaatgctttttttttttttttttttttgagatggagtcttgctctgtcacccaggctggagtgcagtggcacaatctcggctcactgcaagctccgcctcccgggttcacaccattctcctgcctcagcctcccgagtagctgggactacaggcgcccgccaccacgcccggctaattttttgtatttttactagagacggggtttcaccatgttagccaggatggtctcaatctccttacctcgtgatccgcccgccttggcctcccaaagtgctgggattacaggcgtgagcaagtacattcttaaacgaagccctcacttccacaacagccacagcccaccccttgcaagatacagatctggttctccacatacctttggggaacaggttatccaggattccagtgggcctgtcttcctgaggagaagcttgaaagaggtaacttagggagtagtctgacccctgttgcagcggttggtctgtctgggatcacaattggtacttatcatttctcttccactgttcattttaaattccccctcagctttcacctctgctggtcttgatgacttatctgctgatatgatcaaagccttcatttttgagggcctgaacccatagttaccatacttttcttaggctggggttattgcacttgtttgtctatagtcacaattgagcaagtatgtccaactggatcatctgagttccaaatatatttctccctgtcctcattgtgtaacagcagccctgcttcttcttcctgatcagggtcagttactcctaacaagatattgacttctccttcagcctgctggtctctgtatacaagaagtcctgaatgcccaagtggcagtcatagcctgagttctccacagagcctagtattataggaagaggaaacacagactctttcagtgaatcattgaatgtgataagtggactctctcctgcttctgcccaatggttcccagaccaatatattcttcctaattgggataacatccatatagaggtttgtgatgcagtgtctagcctgcatgatgataccccaccatggcagatgccatgatgtaggcaattgcctactaattggcattccagttgtgcctttggtaggctcttgcattgctctatagagctacctttctctggattatgtgatatgtgataaaaccagaggatccatgggtcacaggctcattcgtctcctcctctgtgaagtgtgtctctcatggtcggatgctgtgttatatggaattctatgtctgtggatcactttcaaatcctccagctagtagtgctgcctgggactttgaaggtaagaaaggcaaacagttatctagaataaatgtttactaccatgacaataattcacaggtccttccaggaagaaatggctcaatgtgtcataaagtggccatgtgatccctggtgtactgctcaggtttgatccctggtataccactttccactagacaaattgctgctgagtctgcctgacattctgacttaatatattctacagagctcagctcacaaggggcagtttagaatgcgtagttactggcttccatggtcaaatattcagtctcaaacagggctaagtagcaccccaagagatgtttttctgcactgcagatggtgtggcctcactctagaaatccagaatactgtattttgattcttctatgaaggcttgccataaactccacaccacactacctcttttttcacttttcactcttccaacacaatagagtctatgagatcatatgacccaagaggcagggctgcttgtaccacagcctggtgctgcaaagtcctgctcaggccctattccaagttgccagacttacatgttaactgatatacatgggcgaagcaatctttctacagtattcaattcaatgaataaatcacagcttatttgtccattttcttagatataaacaaaagtataactcttaactgtaagttctgagtttagtcttcagctctttctaatatccccttgcaccagatataggccttctcatacagtgttcaattgcttgtcagttgctatcaactttatctcagcattagctgtctatagtagcttcaaacttaacaaaaatctagctaattccttcatccttgtattcattgctttccttcatcttccttgcttcctcctcaactacatccctccaacacacacacacacacacacacacgcacgtgcacttttctaaagcatgaacattgcacaggccaggaaagttttctcacagaactttcttccaagccatcattgattaaagtttttagtaattgggctgccaccctgtgccagagactatctgtgccccctgtgccacccagaatggcatcctcatcaccagcttgcaggaagtgatctgctcccaaaacctcattttacctcctgctttctcagaccaattccagtaccaactgtatcagttcagttattctgggaagcagatgctgagacagcgttaggagtgcaagtggttcattgaaagataacatctgtgaaagataaagggggagagccccagactgtgctacagagctgacaaaatcttggtcaaaccaatggggagctctacagcaaagactgcctgttagagggacccacattaggcatagaagccaggctctagcaccactgccatgctcagccctgggctgtgggcttcccaggaagagtagagccttggttaaaacactgtgaccgttcctgcaggtgctgcagatggaggctggcagctaactgcctcctgacagttacacagaaagctgtttcctggagggagatctgagtggtgcatctctgtggctgccatacccattttctttttcatcttctctgtttgcacatctgcctttctgtaccagcttctctttcttcctctacctatcatttaaataatgctggatggttttgaggttcttatctcatgccacacttctccagcctcgcctactcccattcatacatctaatgagattctaatgaatttgaatttcagatctgtaagccaggtctcttttctgagcactaaacttatttcatccaattgctcactaaaatatcatacagtgtccttatatttaacatttccaaaggtgacattattatcttcttggccaaaactatctgtatacccatctcagtgaatggatccatcagttacccggatgctcaaaacagcatagtcatctgcaacaacatggatgaacctggaggatatcatgttaagtgaaattggccagacacagaaagacaagtggtgcatgatctcatgcatacgtggagtctaacaacattgatctcatagaagcatcatgcatatgtggagtctaacatcatgcatatgtggagtctaacatcatgcatatgtggagtctaatgacattgatctcatagaagcagagagtaggatagtggttaccaaaggctgtgcagagggtagggggaggaagaaatgaggagaggttggtaaacaggtataaagttacagttaggtaggaggaataaattctgatgttctattgcacagtagggtgactatgttaacaatagtgtattgtatatttccaaatagctagaagagatgatgttgaatgttctcaccacaaagaaatgataaatgttggaggtgatggatttgcaaattactctgatttgatcattatacaatgtatacatgtatcaaaacagcataccgtattccaaaaatatgtgctaattaaaaataagagaaaactaaaaacataaaatcagtatttaaagacaaagaaaaacagacacataggattattcttgatactttcttctcactcatccctaatatcaaacccattattaattattactagtctaaatatatcttgaatctgtctccatttcatttgttttcatctgagttctcaccactaacatttttttccacctgaatggaaatggagtttcttttgttcttgctaaacacagcagtcagggtgatcagcctgtactgcggatggggtctcggtctcttgagtaaaatacgctattggcttccattgctcttcagaaaatttcagactcttcacgtggtttatgaagtccccgtgatctggccctgcttgcttctctttgcaggcagatcttttactagtttccctccacttcagtcacttctattatttcagccactttgaactatttttatattctagaattttatttcagccacttcgaactatttttacatcctagaatgtgtcattcactctgctgctcttattgcttgcacaagctattcctttttatgggaacattctttatttccactctttttttcctataattaacccttttccatctttaatgcatatgaaagcacaaaaatagcaatacagataactatgtgctaccatcaaaattaaccagaagttaacaattggctttaacttagctttctcttttattttttaaataaataaaatgttacagcaacaactaaagctctgccactatccactttttccttctctccccacgcagggattaagatagaattttactgtttttgtaccctctcttgctgttaagaaatctgccatcagctcagttatctttctcttgatgctttcatctttgacttttatttgcttttaaggtctctttgcctttaatgtttaacagttttcctgtaatatgtgtagatattgatgaatttttatttaccctgctttgaattcattgttctattttgaatgagaagttcttagccattatctctttaatattgtctgtcctcattttctctattcttttctcatgtgagtcctattagatgtaagttggatcatccatctttcattcttgccttttaacttctcttttgtgttttctaatatgatatctctctgtgctacattttatctggtttcttagctttacatacatttccaggccactattcttcagctaactactcttctgtctaatccatttctgttatatttcggttgtctgttctgcttcatatatctgttcatttttgtggttttgatcatgtcttttatgtcctgaattatttttttaaaaaacttattttataatcactttgaaatcattctattctctgtaattcttgggggtgtcagtttgaaaactgtgagatcttaatggctctttcatggtgaattgttacctttttattttataatttaggattataaattcatttatcattgagaaaatggctcaaggggagttccacaattgtttccaacagcaacatcagggatttcactgctcagggatatattttatgatactatctcagcttgggaggtgtctcagtcatccagtagtttaaatgccaaccaaaacacacaagtttatgggcaagggcatggttccagattctcaagaatgtttttttaaaaatagaatattgagtttgatgcagtggcgtcgggagcaggacgcctctttgccattcagatcatggggaaagcagtgggaatccaagtgaggagcagccagaggacaacagaggagaggaagggaggctgatgacctgggccctgggcctgtgaaggctgtgactcttctctagctagaggactcttcttttgtgggaaggatagcatcctctgaggacccctgctatgtgagcaggctgacataggtggtgatgaggtctgttcctttctagattcctgtggagatctgtaggtagctgttcactaggaagttaactaagaaagagaacaaaaaccattcatttagatccaaggtccatcaccgctggtagctgtggtggctttggattgtcggacgaccatcagcttcagcaggtctgcactagggaacaatcattcttccctagcccaagcgtgcctctgccctctgtatcattgacagaggctgcatgtttggcaagagaacatagtgactgctgaactgaaagttgactctaactctcgctaccaagtttttccctgacacagtgaaagagtattaagacatcaacctaggatacgttgagaaccaaggacaagatggacagggccaagtaactgggcttcaaccatgactgggaccaagaataagacaagagcccaggccaaagcagaaaagaggctgctatacaagctaaagctggagaagagagggaggctacgggtgtggttaggcctgtagccaatacctgggccaaagcaaaagacaagccagggtctctgacagatgcagtggcagagatgaaggcagtgactaagaacaaggtaggtgctgagacgaaggaaggagcccctgtcagagcctaaggctctgggcaaagccactggagatttcagtcccaaggctgggaatgagtccatcagctccacatataaaaatggggctggtattgatgcctgggtctgggctgaggaagaggccactatcaattcctggttctgaaatggagaagaggctggtaatcattccggtgctaagaatgataaacctgaaattggtgcccaggtctgtgctgaggagttggagcctgtgactggggccagttgcaaacctaggtctggggctgaggaagaggaggaagagaatgtcattgggaactggttttgggaaggagatgatgctagttttgaccctaatcctaaatctgcgaataggatagttagatctcagcctgtggatgaaattaatgaaaaaaaaaaataggcccaaggactggtctgaggtaactatctggcccaaagcccctgctgtaactccagcagtattcggattagatcccaggcatctgaggcaggccctccttcatatattgttttggcctcagctgaagaaaatgcctattctttgcctgtagcaacagcctgcccttctgggaacactaactcaagctcacagcccatccctgagtgtccttttggttccgacccttgaatccagaccatagatgagattagacgccaaatcaggattagggaggtaaatgggattaagccatttgcttgcccttgcaaaatggaatgctatgtggactctgaggaatttgaacaacttgctagcttacttaagtcaactactgatcctcttgttcataaaagagcacagattgcaatgggtatccataacgttcacccatttgcccaagagtttattaatgaaatggtataatgatgcttattgaaagcttgctcagttttccttccccggaaatgagaaaattactaattttcttatgagtaattactctgaatcctccttctggggatgaaagacaacgcaaaattgaattacatgttacgcatatgtgtaaagacaccatgtcatttcctttgaactcacctggacagcaatctggattaaagatactagggcaactgactactgattttgtccatcactacattgttgccagtgacttttcagagctttttcatttgccatccttgagaaagtaaaaaaccagacatcttgttttgaaagtaattttaaatatatctgaaaatccaactgcagccagagacatgatcaatatgaaggcactggcagcatcaaaactcatctttaaccataaagaggcaaaagccagtcttgttagtggtgtggccatatttattaacgtaaaggagcatatcagaaaggtctcaattgtagttgttgatcacttgagttataatacacttatgggcattctcagggacgttaaagggattattgaagcaatgtaaaatgagccagagatagaacactttgaaccatctccaaactctagcaggctgtacattcccaaagagccttgtatcatgttttgttattatggtgtacaagttatacattgcatctttaacacatagttacctgtgacaagctctaggtttgagctaaactattttgggggtaccagatgaatatcatatcactggctgaaaatgtttgttgatttttatcttgtttagattggcatatttttaacattttatttaagatagcgaaccagttcactgtaagtgagctaacttgttcattagtatcgccttagatccatctgtggcttaaaatggcaaaaaagaaaacatccttgaatttgtaatctagttatagaagtaaggcatacacacacacaaagataactaacagtacctagagagagagtgagtgtgtgtgtgtgtgtgagtgtgcacgtgtatacccatgaccaaatgtgcactccgtacataaaggaggcaggggttgctataggctgtttaatgtaagagaaactactatttttctcctattccagctgtatcagatactcattccacaacacagaaagatccagaatttcagacaaaatgtattatttgttcaattttaattttgcttctacatttataactcttaaattgtcaggctgtttcatttatgtcaaagtcatctcacaaaagaggaggtggaaacattttgtgagtgcctattctatgtcagacactgagttggcaccatattttgcaagtttatttttttcctgtactcacagtgatcctgtaaactaggtactcgtgtttttaaaagaactcattagtctgggtaccctccagtgagaattagagagggtaaatactttttcctagattcccacagcaggcaggtggcatagctgttttatctgacaccagaacccatctcaccatactcctttacagtccccctgaaggacattttgaggtgatggccttcaaagctcagagactggttttaacgtttaattttgcaatggaggatgtccatgccaggttacaattcttaacttcctccacatgcatgtgtccattagacatttggctgcatctggctggaggtcagctgaaaagtctgagatgaatagatggattttatctggcagtgtcagaaaaatagtaggtgccccacactttgttcagtgagtaagatggagatttggagtcatcagcaaggggaacttgttagatgtcctttgcatctttttctatccatttgtactttatcttccccaaagagctgaaatcatcctgtacattgttttatatcctgaattaaaaaggtaattgcttttggccgggagcggtggctcaagcctgtaatcctagcactttgggaagccgaggcgggtggatcacgaggtcaggagatcgagaccatcctggctaacatggtgaaaccccgtttctactaaaaatacaaaaaattaggtggccggcgcgtgtagcgggcaccgtactccagctgtcaggagggtgaggcaggagaacggcggaacccgggaggcggagcttgcagtgggcggagatcgcgccactgcactccagcctgggcgacagagcgagactacgtctcaaaaaacaaaccaaaaagaaaaaggtaattgcttttttcctccttgcaaaatcatgccttaattttttttatcatttgtgatttattctcctatgtgtcctatgaaaggccaaagggctttatcttttactagtaggcaagcctgggcatttctgcatttgtaccggctaacacgacagaataaatgtaatcggagaaatttagatccagaattgcagcttcaacaatacaaaacagcaaagctacaagaggctgctgtgccaatctacaagatagtgattcttagtcgttggtatggaccagaaagcatgcccaggacgtttaggttatggctgaattctctaagacccatggtgggaattataatccctagtctgagctgaaacggaagtttctatgtgtgaaaatatggggtaatatgctttgaggttttctgacagttaagaaactaaaacaagatcatactgtaaatatgtatggaacttgcttccccccagttgtgtattgtaaacatctttgcatgtcaataaatatgcctctataacaacaacaacaacaaaatagaatagatacaagggacatgcaaactttggtcagtgggaagatctttgctgactcacattttcattaagtgtatatagcattttgacattcctcattttgtagcaatatcttaattccaactcttcctgtcacatgtgctgacatctcttcttacctagtgtcagcattaaaatccaaactctcagcatcctgaggctggcgattccttccccatgatcatctttctacttcttgagcattcacagagcttgttagtctgtgttcagttctttcataatatctggggagttcctggatttctagagagttcaggtattcgtttgaaataattgttatgttttatctaacatttatcagtggtcatagtgggaagttttggggattatgtagacttccaggaaggcttcatctttcagttcctagattattcattgcccagatatttattgtcttggggactatattgggtattgaagagagttggtaaaaaatacagatagagagagagagatagagatagagatagatcctacactattaactttacaataaaattagacatcagtttctccaggaggctttctctaacttttctcaaatctcaaaattagctattatacgtagctaactcactgtatatttcctcattctgtcattctttttttttgtttgttttttgtttgtttgttttttgagacagagtttcgctcttgttgcctaggctggagtgtaatggcgcagtctcggctcactgtaacctctccctcctgggtccaggcgattctcctgtctcagccttccaagtagctgagattacaggcgcccatcaccacttcctgctaatttttgtatttttagtagagatggggtttcatcctgttggccaggctggtctcaaacacttgacctcaggtgatctgcccgccttggcgtcccaaagtgctgggattacaggcgtgagccactgctcccggcctcattctatcattctatcacactattttaattatatgttaatttgtctgtatcatcttcaagattataacttctgagaaaatggtaaagcatgtccttctgattagttattccacagtgtcttgcacaaagtccaccacattgcagaaaaaagattattgctgaacacagttgcttcagaaagtacttgagaattttcagtatcttttaagaaaattcaattagcctgtttttcccaacattcgtgcactatcgacccttcctttttctcaagtttgttctcctctgtatgtaaattatctcaagcctcctgtatccttaaaaacaaagaaaaaaaggaaacagtaataccttccctagtttcctggatctaaggattgtattctgtatctccttctgtcaaatattacacagtttaccattcctgcatttataagctcttttaaaagccagccaaagcaatcctggtgcttcccagatgccagttccacaggaatattggtcccccatgaggcaatttgctaaagcactctggctctttcctgatgtctgcacttatgactcatggctgatttgattacttcccagtgactccctgaatcctttgcttgtttctatacttcaacgctagttcaattttcttacattaattatgttttaagcattaattatgttttaggcttgattcaagtcttatgctgcatcccacactttttaaaaaattaaaaaacaaaacctttttattgcatcccatgcttttaattgacagctcaattcacctgggatttctccatcaggtcacgcagctctgaaagctctctattgcccccttctggtagctggcagactagctcctcaattagcttacatcgtcaatgctaaccttgttgcttgatgttgctatgcctcagatactagtatcttcctttctttcctatattcttcactgccgctgtttcttcatcatctatttattcctcattcctttcagactgacttctgctgcctccagccttctaccaaaacttgccatcccattgatacaaggccctctcaagtcttccggatgatctctgtatatgaaaatattgcccttccctttcctacttgccccaacactttattctaagaacttgaaattctattagaaattatctactctaggagtcttcaaatttgacaacagattaaaattgccaggacaacttaaaaatactgtttcctgggcccccttcctgaaaattctcaccttttaggtctgaggtagaggtctcttttgacctattgtcagcattaaaatccaaactcccatttgaactttaatttaaatgtatttattcagttaggtaaatcatgcattgggtaaaaatttaaacaatacttaaatccacccttcctgtataagtgttcttacaagctatagagaaatacctgagactgggtaattgataaagaaaagaggtgtatttggcacagagttatgcaacctgtacaggaagcatgatgctggcatctacttggcttctggggaagcctcaggaaacttacaattatggcagaaggtgaaggggaagtaggcgtggaggaagggggtggggaagtgccacacacttttaaatgaccagatttcatgagagctcactcactgtcaagagaacagcacgacaggggatatctactcaccacgatctaatcacctcccaccaggccccacctccaacattgaggattacaatttgacctgagatttggacagggacacagatccaaaccatatcacttccccttagtttccttacatttcctctcctaaggcaatccttgttaacagtttcttaaggatccatgtaggcacaaattccatattctaaagacatgtctcaactgatttggatgcatttggtccactaagcttgaggagcctctgatttaattcacccctctcatcttccttgaaatcctttcatccttcaacatcctttatgctgattgtcgaacatctctgatagtttgattctgtcttcttggtccacacctcctactttttctgactgtttcatgtgggcattccccaaactactccccttgatcttcttttctgtctatattttctttcttgacacatctctccagacctatgagtcactcacagaatatattcatatcacttgcgccaacatctcaagctagccacacaccagtattttttctaccagttagacatttctgtctagttgtctgggagcacctcaaattcagcacccaaaatgaactcacctttctgttaacaaaactacttatgcttctcttttccccattgtccttacttctgttatcattgactcttcctcggcctcttttatgttaattgcaccttgaaatgacccacacttcctttccctccacttcagtttcgtttgttacagcattttttacactagcttcacttgtggttaccacttccctgcccactgctcataagccccttgaggattcttcagggcagcaactatattttctttatttctatgttctcggcacctcactcattctctcatagtaggtgttccatagatatgttgggtcaatgaatatccgttaaagctcaaatttttaacatggcagtcgacatcttccatttctgatttaccaacctttttaatttagataacttaatttacacctcgccacaaccaaactgaactattcacagctctcctgaatgcacattgcaatcttccttttgcacttctttgtttatgcttttctttctgcttgaaattctcatctgctccctgcctatcaaaatcctacaaatccctcaagtctcagatcaaatgccttattcttcccaaaggcttcccaaatccttaagtcctgggttcccacagcgtgtggattgcactttagtctcacttctattcaactaaatttataaaatcatcggattttagttgtgaaagacactttagaggttcggattttagttgtggaagacattttagaggttacctaagacaaccctgtattttacagctaagggaactgagacccagaaagagtaaatgtcttgctcaagattaaatatcagccagcgaccaatggagccagacctagaacccaactctcctgaattgttttccagagctatgctgcctatgcaattgttttagcttctcttccggaccattagtgccaaaagtcaaggattaaattttattcagctttaattccttataatatccaatatagcacctttcatatagtaggttcacaaaagctatactggattgaaatgaacatttaatgtactggttaatagatatttttagccagagttccctggaaaacagagtgtgaggcagagattacttgctgatgtgagagtaaggagaaagaaaaggcaggaaaggctaagggacaatgcagtgactgctgcttcccagcgaacctggaaacccagcaaggaatgtggcaagtggtctgtacatccaagcaaggtatctgtggccaggctgtatggacccatgccttggggcagttcataataagcaacttactgtccccatatcgtctcatatcttttttcccaccgatcagagttactcccctgcacttccagttctgtcatctggcccctttgatggctctttggaaagccagattccatgccctgcgggaaggttcttcggttgagtccagagtggaagaggatgcaaataagatatgtccaataaaaaaagctttgaacctacacctgttacttaaccctgttacttgagattgttcttattttggtttttgaaatccattgatgttggaaacacaaaactggtgatggctttctttaagagacaggctgaaacagaaatttttttttttacacggagtttcgctcttgttgcccaggctggagcacaatggcacagtcttggcttaccgcaacctccgcctcctgggttcaagcgattctcctgcctcagccttcccagtagctgggattacaggtgcccaccaccactcctggctaatttttgtattgttagtagagacggggtttcaccatgttggccaggctggtctcgaactcctgacctcaggtgatccacccacctcggcctcccaaaatgctgagattacaggcatgagccactgcgcctggctgaaacagataattttgaaatgttttgtgcaagttaacagtgacattcatgaagagaatgataaaagtacagcttgaataagttctgatttttctctcttaagaattatgtgcaaatccatacatgacttttaaaaatcatcagatttcaatgttttctcatatgatgttatgattctacattaaaagaactataaactcttctaattaaattactcaagatagtgcaaaagaatccatgactctttgtcctcagatataactcataccctaaatgcaagttgttcaccagtgcacatgacaaaaaacacctaagtagggggaagaattctttctttcagacaagtggttttacctactttaaaaaaagccttgaaaacttggacacccttcaagagcctctgaatatttttcttcagcagaaattccagcccagatgttcaataactcaggtttgttttaaaagaggaaatagagagacaaatttttgtaaagggcaaaatttgaaagcaattaatggtgacatgtccaagaattttgcttcattttattattaacgcaaccattctttccaaattttattgtcagatattggagaagagaggggaaaaaagtctgggaattggagataaaattcaacattaaaggagatattttaaatcccagtcaagaggaaaggaagagttgatggctaagctgactgccaaaagacattgtaaagttaccagataacaacaagtgataatagaagggcctagggaagttctgctcatagacttcaaacttggaaaggtgtcctgcagaccaaaacctgctgacctagcagtggcaaagttgccttaaatgaattcacaccgacaagcctggagggattgtctcttcatgctaaagtgatttggtcatacatatctgagggcactaggtgaaatttctggagaatcttggaaaataagtgtgggaccagaaagatagaatcactttgttctggtttactttaaaaggataaaaggtgcttttcatttgctggatcacttaaatgctctaagcctctggttctcctataaactggggactatttactagccccatttatttaccagaattgttttgataatttaaaaaaaaagatatgcaagctaatcataaattctaaatcaatataaaaatgggctgggcgtggtggctcacgcctgtaatcccagcactttgggaggccgaggcgggcagatcacgaggtcaagagatcaaaaccatcctggccaacatggtgaaaccctgtctctactaaaaatacaaaaattagctgggcatggtggcacatgccagtagtcctagctacttgggaggctgagtcaggagaatcccttgaacccacgaggcagaggttgcagtgagacgagatcatgccactgcacagagagactggcgacagagagactctatctcaaaaaaaaaaaaaaaaaaagatagtgaatgactatttaagtcccttcttctttccattttcattgcactttacacatactactgttgtagatcttactgtgttgcatgatggagaggtttatgtccagtttcccaactggaatgtgagatactcaagaggacagacgtcaacttatttttcatatgacccccccaaacccaaaacaaggattagcatttaatgagtgcttaacaaatgcttgctgaatgcagcaagattaaaaaataatctcagcagactgtgctgcaaaacagaattgcaagatgatacctaagataaatataaaccctacatttgactctaaataataaattgcacaattattggattgtaaagtcctagtccagaggtcatggtaaaaacatctgggagctgcagttaactataaaaacagacaagagaccgatgaagcttctaaaaatattaacttattaatactagcatagaatcatgggaaatgatgggaaccaagagaaatgatagtctcactgcgttccttgtgggtcaaattacattttaagaggaattgataaactagagtaaattcaggtgactccatctaataggatagacagtaccccatgctataccaaaacgagttaaaagagctcaagtagggctctggggaagagaaaaataaaatacagatttgagctgtcttcagttatttgaaggagatccagtgttgtcccagtaggcaaaacttagaccaaaaaaattttactcccaaatttgattatcacatatcagatttggattcagtaagaagaactattctaaagatcacagctgttcaacaatggaatggactcctctggacggtagagagattgtgtcacacaatacctggggcttagacatttcttgtaatcctgtctgtacttagcatagctctggacacacaatccatagtcactaaatatttttcacagattgatactagggaaaataataatatttaactatgggtatatgcctactctgcccagtaatgtttagtattgaaccagaggtctagattagtgatctccagatttaattcattatatactcctatcagtaaagtttttgaacaggtactcctaatatatacatttatttataaattctatactatactactctactaatcgtcatatcaaatacatgtttataaaacaaaaataatgtaagggcaaaaatatgagataaagaaaaataaatgttaatgtgttttctttctgcacaccaatggatcatcatggccaccccactttgcagagaactggtctataattaagggacttaacatctgcctaaatacctggatattttaggcccttctgagtctgaatgatctacatatcaatcttaattttttcatttctcttttcccatgtagacaaaaacaggattaaaaaaaaggttaagcgatgttctaccatttctatacagttgacctttgagcaacacaagtttgaacttcacaggtccacttatatgaggattttttttcaataaaagtaacactgagtatgctgcctcttctgcatccccttgcacatcctccatctcttccatctctgacacagtgagacagcaagaccaacccctcctcttccttttcctccttagcctactcaacatgaagataacaaggatggggacctttatgatgagtcacttccacttaatgaatagtaaatatagtttctcttccttatgattttcttaataatgttttcttttttttctagcttactttattgtaaaagtacagtttgcaatacatatgcaaaaaaagtcttcactgactgtttatgttatcagtaaggtctctagtcagcagtaggctattagtaatcactttaaaaagccacttatagattcaatgctattcccattaaactacctttgacattcttcacagaactagtgaaaaaaaaaactatttaaaaatttatatgaaaccatagaagagaccaaatagccaaggcaatcctaagcaaaaagaacaaagctggaagcatcacgctacccaacttcaaactatactacagggttacggtaaccaaaacagcctgatacttgtaaaagaacgaacacatagaccaatggaacagaataaagaacctagaaataagaccacacacatacaactatttgatctttgacaaaccaagcaaaagcaagcaatgaagaaaggattccctgttcaataaatggtgctgagatatctggctagccacatgcagaagattgaaactgaaccctctccttacacaatatacaaaaattaactcaaaatggattaaagacttaaatgtaaaacccaaaactataaaaaccttggaagacaacctagcaagtaccattcaggacataggcacgggcaaagatttcatgacaaacatgccaaaaacaattgcaacaaaagcgaaaattgacaaatagaatctaattaaactaatgtgcttcaatttactttgttgagagtataaaaaacactatcaacagagtaaacaggcaacctacagaatgggagaaaaaattcgcaaactatgcatctgacaaaggtctaatatccagcatctataatggacttaaatttacaaagaaaaaataaataaccccattaaaaggtgggcaaaggacatgaagacatacatgtggccaaaaatcacatgaaaaaaagtgccacatcactgattattggagaaatgcaaaccaaaaccacaatgaggtaccatctcatggcagtcagaatggctattaaaagttaaaagaaatgcttttaccctgttgggagtataaattaattcagccattgtggaagacaacgtggtgattcctcaaagacctaaagacagaaataccattcaacccagcaatcccattactggatatatacccacaggaatataaataattctattataaagacacatgtgtatgtttatttcagcactattcagaatagcaaagacatggagtcaacctaaatgtccatcagtgatagactggattaggaaaatgtggtacatatacactatggaatactatgcagccataaaaaagaatgagatcatgttcttcgcagggacatggatggagctggaggtcattatcctcagcaaaccaacacaggaacagaaaatcaaatcccatatattctcacttataagtgggagttaaattatgagaacacatgaatgcatagagtgaacagtacacattggggcattttagaggctggaggatgggaggagggagaggattaggaaaaacaactaatgggtactaggcttcatacctgggtgatgaaataatctgtacaacaaactcccatgacacaagtttacctgtgtaacaaacctgcacttgtacccctgaacttaaaataaaagttaaaaaaaaaaagaataaagggtagcaaacacaccttcttgctacaaaagaaaaaaacagtaggctattagtagttaagttttggggtagtcaaaagttatgtgcaaatttttgattatgccattgtcgacactcctaaacccctccattgtcaagggtgaactgtatatgtttttgtaagtcttttatgaaaatatttttaaatgtcagttttttgttgaccctgcatgattgtgatagaatttttctacctcgtgtctccaaaacagatgttgttcccttataattataatacattttacaaaatcgcaactgcagagtgttttgttgaagtgatcatcttaaatgaatgcatgggcagtaaccggatcaatcattcttactcctgtcaagctttcaattacattccagagtcccaacacaaacctagcagcttgttggaacatctagatgccctttgcttctagatcctccctctttcctcccagatttggattacctttaaatgagctattatctgatatgatgccacagtttccatgattcgtattcatttttttaaaactttcgtctatgatctagtaagtgacgatgactggtttattgcaaaattttctgaatcactttgctctgtcagattaagctttcagctaaccagcagagggagcacaaagagacacactggtttcatctcagtgtacagggagtctagttactaagtggacgaagaactcccgcacattgagatctggtcctcaatggcaagaagcactgttcgagcaatcaggaaaatctgggctttaagcagtggcaccactacgaatttattctcttgcctaagattacttggaattcctatagtagtgggggaggggggactctcttttgtactagttcctccttaaattttaaagaaattgagcccgtggactgaggtgggtgcggatggtgggatgcagaggaaacaaaaatttcttctcatctagcttccactccaaatctgtttctcccagagaaaatacaagacttaggagtgctgtatgaagtctcttgctgctctattctctaggaaacctaatatgaaatcattaagctactgaatgtcagtttcttcaacagtaaagaagatacattattattgctgttattattactactactactaccaccaccaccactaccaccattgctattcatttagtgacttctgttttctctacttaatctcacttattcagcatatcagccctaagaggcagattttattgctcccattttacagatgaggaactggaggcttaaagaggttgaagaactcaaccaatgtcaagcaactagaaaggaaacttgaacaaggtgtctctgattccaaagctccatgcttttcatctgtgttggtaataaaaagaataataccatatcacagttatattgtacattacaaagcactttaacctttatcatccccacctcaggataattctgtgagctaaacacggacaaatagtaacattcacccctccctatctctctttacctctttagctcctatttttaaaaaacaagcaattaagggaactaaagcttacaaaatgtaaaggattcttctaaggtcacatagatgaaaaatggatttgggattaaatgggttttattcctgtagttgccacatcacactgctttgccacatagagaggaagagacctagctttgcctccaactagctcttttaccctaaaatgatcatttcaaccctggagttcttgcatatacaaaatagatgggagtaacaataataattaatacttatgttaacaacctcacggtattcacaaagatcaaatgaaatacggagatagttatgaaataagtaaataatatacagacaagtatagttctattgtaagattatcctgggtgttagaaactaggttatgtctgacttctggcaaaattacaggacagggcaggttagtgtctaatctgcctacttcccaatccccaggtagctgttgcctgaaaaggcatcggaagatacttaagagataggagattgttcatatttacttaattttttggatgagactgtttgtctggactgtcccatgagatggtatttacctacttgggaagctcattctcccatttgggacttggaagcattctcattgtacaacagtgagagctggaatgccattacatcattatgaaccacccagtgcccatttgatatagttaataacaaggattaatgaagtaatttaaaaggaagaaatagaatccttgccctgatccaagacaaagggacaaaaaaaatttctttctgaaatttgagggaaaaatgtgtggttgcttctattaagaaactgcctgagaaaagtcacagtgtgtgtgttatgtgggaaataagagtattggggcaggcaatcattcatatgttagatttctttgttcagatcaatattgtttgagtgctaacactgtggtaggtgctggaaatcgaatgctgaacagaacagataagttgcccacactttcatggaatttgcattttagacagacagccaacaatgatcaaataattacatgtttggtgggtgttacaaaggagaaaaacagacttccattatgacctcttatgtaatcacactgcaatatcttgaagttattacttataaagatcaagcagaagctactgctgcatactagagaactttaaatgatttccaacatcgagaaacttgaatttcttaaggagtagttattataaaaagaaactggaatggctaatcttggctgtctctctgaagccaatataaagaaaatgagtgatacccaacattatcttgacctcactgacaactagatagcctaagaaacagtgtgtgcaatagagtagaaggaagaatcaaaggacatattttataaggataatgagttctgctttcttttcctcttctgggctataataatttttgtctcttttgtaatcataccctcttggaaagccactggcttggactgatttatgcctactacagatttttccttccaaaagtacatctccatgactaaggaaatgggctgtctcaggttggctggttccatcaagaacacttaaaacttgattgcactattgtaaaaccaactggggtcttagcatcaacttgcattttctcattggcatccaattttgaggatatcatattgcttggagaagaaagaggcagtagttattataatttccatggacttacagagttttagagacttgaatatcgtgtactttaacctcacacccagtgtaagaatctcctatacctgattcatgatattcatcttttgaatacatagggtaaaaagagcttactctctcatttttgaagaattctgttattcttttttatattggagaaactctaccaccattagtcttagatatgttcaccagagccatcatggaccaaatcagaagtaatcatttctacttaaagactttcctcctcttcaccactaacaagtcttttctcttctaggctaaacattccaggtttttcctccattctgtataccacatgatcctccaaattgctcccattttggatgatggagcttgaggaggtggaagatcaaaatgttagtgtgtgttatctaacatatttgctctttctctcagttttgtaacattagcaggtttgatcaatatttcacctgtgctgcaattcacattgataattaaactatacagggttgctttaattataaagctaaaagtggatttttttccattaacattgccagataggatgatttgccaactcgttctctgggtctagaaaatacccaatgaagtcatattgactctaaaatcaagctctggatgtgaagatgctgccatgctgttgagtcaaaagaatatattatttttgatttctgttagaccagtaattttagtaactttggcaaaaggaatataaaaacaagcaatctccaatttatagggctgcactgtagaagtcatttgtttggaatgtatttcacatgagtattaaatttttggggaagactaccaaattttttttctttttttttttttttttttttttgagacagactcttgctctgtcacccaggctggagtgcagtggcatgatcttggctcactgcaacttccacctcccgggttcaagcgattctccagcctcagactcccgagtagctgggactacaggcgcatgccaccacacctggctaattttttgtattttagtagagacagggtttcaccatgttgcccaggctggtctcgaactcctgagctcaggcaatccgcccgccttggcctctcaaagtgctgggattacaggcgtgagccatcgcccctggccaaaatttttaactcctaagacaactgacattgtaataccaccccagaaatcagttgcaaaccagaatgtcatttcaggttctttaacttaacatgtaccataagcaccactagaaatatttagacatctagcacgatgtttaacaatgtttttctggattcggatgaccaggatcactgctgggaacaccaggaatattttcatgcttttattctcctatccaattgagttaaggatccccggccccacatctgctgaataaagaaaactgggatccttgtggcctgaatctggtggtggctgggaaggttaagatgcagtgatagatgctacagagcttctggaagaaagcctgcctaccactggggtatactcctcagtcttcatgggtcgcagtcagactcccattctctctttccctccacatcagcctgattcatagcctcttcgtactcattctctctctctcctcctactctctcttcctcaggggtcatgacaaaatcttccagttttgtttcacttatcccttaagcactctccaatgctttaacagttttctaaggtttgtttttcccctgctgggtagctaatgaattaattaagaggggaatattgctagttgcaaaagggaagtggggtctatagaggatctctccagtggcagcctctgtctctcaatctctctcccattctgtctcacttacagctggcagggagaggcagaatcacctgcagatgctgcctgtgggctgagtaaaatgcaccaacttttcaaggaaaagcaaggacaggcgattctaggccttaagggaaagatggtgaggtaggtctgacatctggcctttgatgagaacacagaacggtacttctttgtgggagttgggagtgagaagctgggaactaacttttatttttttttaactcttaattgcatttattttatgctgaatttattcccatgccataagttttcgtttcttcagtttcttttgagatatcttttttttccttatgtgcaacagaaatatcatatgttgcagaaatatcagcacaaaagaaacttactgaatccttactgaaaaggaacagattgttccagattacttctcttcaggtttaggaaaaatttgttccttttcagtaaggatcatcttgatgtggcagggagagtacatgcatgggttaatccgaccatgagctctataaggccagtagcaaatcttaggtgctttatttacctgggtatgctcaatgacctgagaatctacatctacacccttaagttcggcatttctctcagcatttataaacatgcagcaaaaattcagcactcattttgggccaccaaccctgtgtccagccccactgcttggcctgggcactaccaactcccccattgtaacgtcagaatggtacacactgtttctgtgaagtgacatctttcggatacttggtggcttttcatataggcacacccttgttggcctgggcagtttcacgagtgttcttacaggaaacacaactatttgaaattcttgatttgcctgattttgaggggttttctgggtcgagtgaacagaaaactattttcacagatcacctcaggccacttaggggaagagtgggactaactttcttgatgttgcttttgcctgccttctcttttcacaaaggaacagatgttcctttcaccaatctttcaccgtcattcatttttcttcctccccttctaagacacacttggctattgcagaaacacagttccttaaacacaagtccaaaattcaaacagctctgaacattgaaagtttttggcaacctacattgcagcagaatttggcccaagctgacatgaggtgatatcatctttatttactcacatatttactacaaaaatatcaattatcaatgggattgtttcaaagtacagccccagttcctgcttgagtataatcaaacatatgtatattacctttctaaaatctgaaaatttttgaattctgaaatacatctggccccaaaagtttctaggtaagggattatagccctttatttcctgttttcctacatctttctctttccagctaagtgtaaaagagcatagactctggtaacccaagctgaattcaaatcctatatctaaatatcagttgtgtgtgattttgctctgtttacttaagccgtctgtgcttcagtttccccatttgtaaaatagggataatagtattacctatctcaatgttgttgtgaagatttaattgagttaatctatgtaaagtgcttacagtaatctctagcacatagtaagcactataggtttgctattatcatcaaccttaatccttcactctacccaaaaatattacctaatgtcccaattataaaatccctgctcttcgccctattccctccatagttaaccctctatccattttcttccactcatgccataaacagaaaaccatttgtcattagttaccattgactactcttcaactggctgaaatctggtttgctatcctatttctcaactccatggtaatttctctcattaaggtccctaatgcctcttaactgccagtttaaaagactgctgtttagtttcttttgtgctgttatttctgcaacatataatatttctgtgacaaacagactcggttctccttctacttcattttcattctactgctccggtgactcgctcattaaaggttgacctccccacgtgtttcatcctttgtcctttttgtacagtacacatgctccttagaaaaatctcatccaatttaaagtgtcagctatcacctggataataatgactgccacattttatcattagccctgacctcttccttgtgcttcagactacatttcctatttgcctcctgtgtccagccccaccacttgacctgggcactaccaattcccccattgtaatgtcagaatggtgcacgctgtttttgtgaagtgacatctttcggatacttggtggcttttcatatatgcacacccttgatggcctgggcagtctcacaagtgttcttaaaggaaacacaaatatttgaaactcttgatttgcctgattttgaggggttttctgggtcgagtgaatagcaaaccattttcacagatccatctccacttggatgacctgcaggaatctcaaatgtaatatatcccaacgaaatgtatgatcttctccctgacatcctgcccctaacccccattcgagcccccaaagtaatctcacaacatgtatgttttttcatttttaatctcagttttaatggctttgcacacttcacctattagcttaggccagaaatgttgaatcttcattcgtctttaacttccacattcaatcagtcactaaatcccgccaatttgtttttagtaacatcgccagaacctgcctactgatttactaagggcttgtactaactatcatgtagaccagtggcttgacctttttgcccataacccatggtataaaatatattttacattgtgccctgggatatagacatgtttatgtacatctgtgctctattttatttcatttcacttttctaaaattatggttatgataccctaaattgattttacaatctaccaatgggttacaatttgcagtttaaaacaccctgacctcaaataatagcactttactcgtctcccctctcccgaccccagtgggtcaatagatagcacttcagaggttgtgtaccaaaacccttaaaggcggggattgtaatctgccaaaggaaatactcccaagaaggtgattctgatatctcctatatgttctactcagttatcaagacaatactgaatatttcttagacatgtactatacataaagcacacagctgtggctcaaataaggatggttcactgatttggcactcacatttacatgaacttggaaccctcaaaagcccttaatgctccatgtattttcacacctccattgacactgcacatactattccccttgcctggagtgtcctccatactccctttcatcaggcagatgcccatctgtagcaatgtatacaaaaatctatttatttaccaaagacagttaggtagcagaggggtagtagtggtactgggcccagtttatgtccctctccagttactctgtttcctggtcacaatggtcccagcaaccgccatggtcattgctgccagctcactccacaaagtctgtcacaatagcctgcccctcactctttgatttgctgactcagaaatactggaagtcacattcatggtttatttaaacaaggaaaaacatacgtatgagcaggatgccccacaggtgttaacaaccacatggccttctgattaagaaagtttccatccttggatactcatggttttctccccatttctctcctacctaggaaatataatatgaggaaggcactgttaggatccccaccttaagggtgagggaactggggcataaagagattgcgtgattattgcaaggcacttaaccaatatgcagcagagcctatagtttgaaaacatctctggagatgaaaatatgctccttttctctcctataatatttactggaaaaagactacaaatccaatttgtacttgtctacgcactggtcctgtttctcctgacttctcatgaaggggactcaagcctttgtgtgtgtgtgtgtgtgtgcatgtgcacatgcatgtgtatctctgtgtgtgtactctcaatcagcactctaaaatatattggcactctgaaatatatgtgtatttatgcatgttttataggcacatattactgtataatgtaccatgtaaattataaaacaaacacacaaaaacataaattcaaaaagcatgaatttttaaaattataagagaaagttctaatattttttctgcactccccagtatattatcttggatactgtattttggagacctgccataaagtatcatacttagtagaaaaacatattttctttcatatacaggaaaaatattgatccacaatcaatattgttcacagggttgcttctcaagctgtggtgttgtctgaatgtcatatcccccaggatgccattcaagacaagcatttgcagttttgagatggctaattctaattaggaaagcagactgccaccacaggttataatctgactaatgtgttcttggaaccacggagctactgaagttttcgggtatgatgtcagtaaggagtgatgaaaggaggactggattaacagcagataaaagttctaaataatttgacctctgcttaaaatagcgatgggccttgaacaaaacatttaatagtaacgggtcctttgattaaattgcttttgcatgtatttaatattaattccactgatatgatactaaccctaagaaataagcatggctgatactagcccttaattttatatcataaataagcaaaatcttaaagagagtaaatgacttgcccacacagtaagaggcataactgggcttcacaatggtatttttgactcatgtattatcttaccttgcttaacctctttgggcttcatgcctttaaaataaactttctgttttagaacagttttaggttttaaaaaaagttgtgaagatggtccaggtagttcccatatactttacacgcattttcccctatgtattcgcttgctagtgctgctgtcacaaagccccacagactgggtggcttaaacaacaacagtttattttctctcagttctggaggctataagtccaagatcaaggtgtagaccaagatcaagaggcttttctggggcatctctccttctcttgcccatggcctccttcttgctgtgttctcacatggttttgtctctgtcctgatctcctcttcttatcaaggacaccagtcaatttggattagggcccaccccaatgacctcattttaactaaactacctctttcagggccctatttccaaatatagtcaattttttttttttttttaatctgagtcttgctctgtcaccaggcgagagtgcagtggtgcaatcttggctcactgcaacctccgactccctggttcaagcaattctcctgcctcagcctcccgaatagctgggattacaggcatgcaccaccatgcccagctaatttttgtatttttttagtagaaatggggtttcaccatgttgcccaggatggtctccatctcctgacctcgtgatctgcccgcctcggtctcccaaggtgctgggattacaggcgtgagttaacattcctggccccaaatatagtcactttctgaggtactggggttaggactccaatatataaatttggatgggaacacaagttagcccctaacaccttattattaatgctttacattagtatatttatcacaatcaataaacaaatattgatacattattattaactgaagtccatatcttatttagatttccttcattttcacctaacaaactttttcagtcccagatgctatccaggataccacattacattttgtcactgttacatatttaaatgtttgcgtcctctcaaaattcatgttgaagttctaaccctaatgtgatgttatctggagatggggtctttggagggaattagatttatatgaggtcatgaggattagtgtcctataagaagaggaagagaaaccagagcttgatttatactgacaccttgatcttagactgtccaacctccaaaactgtaagaaacaaatgtctgctgcttaagccattcagtctgtggtattttgctgtgccagtagactaagatagtcatcaggtctccctgagcaactcttgactctgacggtcttacagttttcttgtttttgatggccctgagagttttgagagtactggccagatattttgtagaatgtccctcaattgggatttgtctctttttttctcattaatagactggggttatgagttttagagaggaagaccagcaaggtgaaatgtcattctcatcacttcgtatcaagggttcatactatccacatgtcctatcactgatgttgttgacattgatcacctggctgagatgctgtttatcaggtttctccactgtctcccataacattactcttttctccttctttccatactgtattctcacttacagaatgggaagtttagggcttcacatgttatttgtaaaacagcaggactggattactccatttctaagtcatctctagtttgttccttataatcaatgagaagtactgtcctgattgaaaaggaaatctatattcacagaacagggtgagagagcaggatcacttaggttcaaacccttagttttaaccgtcttagcgctctttctgaacagagggactacaaaaaaccattgtgaacgtagcaatttaatgatctacttttttgcaagttggcaccatattatgtattgatcagccttggacagatcactgtgtccagactcaattctgaaaacttgtggagggttggagagtaggggtatgtctattcttcacctaacaacactgatgatgatgacactgttggtcataaagcaatactcaataattttgttgattgctgatcagttacttcaaacacaaacttgtagaccattttctttctttcttctttttttttttgagatggagtctcgctctgtcacccaggctggagtgcagtggcatgatctcggctcactgcaagctccgcttcccgggttcacgccattcttctgcctcagcctcccaattagctgggactacaggcgccccccaccacgcctggctaattttttgtatttttagtagagacggagtttcaccttgttagccaggatggtctccatctcctgacttcatgatctgcccaccttggcctcccaaagtgctgggattacaggcgtgagccactgcgcctggctttgtagaccattttctagaaccaacaggtaaaatttactagaaattttatcttggacgtgaactctaggtagtttacatttcttattctagcatatagtgcatgcattgagattctaccaatataaatatgtaaaataaggcaaaataaatgaatttcaaaaggaaattaaggtctttaagctttatctatgtgaattatccttaaaatgtgaagaattgctagctgttttttatccaacttcttatttcctgcaccagtttgaaacacactctccttaagaaattcttaaaagtttccaattactgtaggaataatggaaatttttctctttaaataacccgaacattaatttgttgttctttaacaggatttcctttttaatgattataaaagctcatctgtccatgatatatagcaatgtacccatacaatatgaaattgtattttacccataaacagtcttcaaacaagacacacaattttcttgcttactggctaattaaaataaaatttaaacccacattaaacttgattacattgtcaaaacacccacatttttaaaggagaggcctacagtgttaattcagagagagtgattctttactcttcagctaataattgcttcagtattaataataacttcacctaaaaatagcttcggtagtctcagatttttaaaatcatgtcaatgtaatcatgcttttatgtcctcttcatttgtggaaaaggaaacaaatgatttgtcctatgtatgagaagatcttttaaaatgaagtttctagggtttccaagttggcgaaacgtttgtcagtatcatcatctggtttgtagaccacattgattcatatactggctacactgcatattaattgcagtttctttattatggaatatttaaaatgcacaaagatacacagtgaactataataaatacccctatgtgcccacctccaggaaaagtaatcattgtgtttttaaaaaataaaacatcatactggagttcctctttgtttcatgttcattctctttcttcctcaggagttatcagtgtgctgcagttgatgtgcattttactcttcgttttatcatatctgcccacaaccacaaatgccataggactgtgttttgtatttcaacattttatttaaactgtatcatattttctgtatcattctatagcttactttcttgactccatatgtgagttcaagagaaattaatgttgatgcatgtagtctagtttatatttttggctatctagtattttgtcatgtaaataaatcagaatttgtttatccatttcccctatgatgagctttaagttgttccacaaagttgagtcttgcaaaggttgctagactgaacatccttgtgtattcttgtgtacgtcaactgtgccagttgtggggggagaatatacctagatgaggacttgttgggttggaagacatagttaacttcaattttaccagatagttccaaattactctttggagtgattgtagcagaattcactcccgagtaaatgaaaatttctatttccaaatatcctcaccatatcctcagacattttaaatatttaccaatctgataagtattcttcttgctctcattttcctgatgactactgagattgagcatttttcatgctttttcttgtttcactttaccttctttttctgtaaattatttattgccttatctttttattgcttcataagagttctttatatatcttgggtattaatgctttggtatgcaactagtaaatatctcttcccagtttatcacttgccttttaatttaactttttaaatatgtattgactaagaagttagatactagtcatttaacttcgtttatgtaattttttattctatagataatttaaatttcggaacagccatatatatgtctagtttcttttcattttgtctttcaatcagctctaataattttctcaactgagatcttgtatgagtttcatttatttttaactatattatagtttttgtttttcttttttaatgagctttttaaatttacattttctaaatgattttttgctggtatatatgagcactatggatggttgtacattaatctttatatgcaacaacattgcttaactctcttgcttttccctacaggaaaatatataaaaataaccatttttttctcccttttcaaaattaattcctatttttgtcttattgcattcattagaaaccccagtacaatgttgaatagcaacattctgtcttcttaaccttaaagacaatacttctagagtttccctattaaatatgaaatttgctatatttttggtatatggccaaaagaggtacatgtaagatgtatcagtcaatatttagatttggaggtaacagaaactcaccccaactatcttaaactgaagttgggtaaatctgattctttaggtcgctgctgagaactccattacggacatcactgcttcttggtactcagcactaattccatcatgttctcattttcatagctaccagaaaaacttctccactgttcttatatcttactgtcgctctcttgagagtcaaaggcctagatgacagcattcaattagctggagctaggaactaacatgattgagttgggtttttcctttcttgtactatccaggcccagttttggtgtcaagattgtactagcttcataaaatgaattgaaacacttttctttttccttcccttccttcctttcttttcttctttttttttctgaaattgattaagaaaaaaagtatcaggtttttgaaagtttggtaaattgtaaaaccattctggctagtgcatttttagggacagggaaaaaagatagacaaaaataataatttattcagttattagttgtctgttcaggctttgctatttctattttggtcatttatattttttggatacatcagtttcttttaattttttaaaagctttgaagataaagctattcacagtattcttttattttttcaaatttgtacagtatttatagttgtcgcttctttttcattcccagtacaattatgtatcgtgcgttctcttttcttttgcttgaccaattttgctacatgtttatctattttattagttttttcaaaccagtttttatactagttcatcgggttctaaaaattatgctgcaatacttatggcctaaaaggaatagtaattataatttttagtcatatgtagtaactactaggaaaaagtttatttttctgttttaattacattaaaaagtcccctggaaaatatgagttaagtgttttctcctgcggagattgcagtgagccgagatcgcgccactgcactccagactggcgacagagggagactctgtctcaaaataaataaataaataaataaaagctttttcctatctagtttttacaaggaaaatcttttttattgattgattgattgatttgttatcataatactttaagttttagggcacatgtgcacaatgtgcaggttagttacatatgtatacatgtgccatgctgctgcgctgcacccactaactcgtcatctagcattaggtatatctcccaatgctatccctcccccttccccccaccccacaacagtccccagagtgtgatgttccccttcctgtgtccatatgttctcattgttcaattcccacctatgagtgagaatatgtggtgtttggttttttgttcttgcgatagtttactaagaatgatgatttccaattccatccatgtccctacaaaggacatgaactcatcattttttatggctgcatagtattccatggtgtatatgtgccacattttctcaatccagactatcattgttggacatttgggttggttccaagtctttgctattgtgaataatgctgcaataaacatacgtgtgcatgtgtctttatagcagcataatttatagccctttgggtatatacccagtaatgggatgactgggtcaaatggtatttctagttctagatccctgaggaatcgccacactgacttccacaatggttgaactagtttacagtcccaccaacagtgtaaaagtgttcctatttctccacatcctctccaggacttgttgtttcctgactttttaatgattgccattctaactggtgtgagatgatatctcattgtggttttgatttgcatttctctgatggccagtgatggtgagcattttttcatgtgttttttggctgcataaatgtcttcttttgagaagtgtctgttcatgtccttcgcccactttttgatggggttgtttgtttttttcttgtaaatttgttcgagttcattgtagattctggatattagccctttgtcagatgactaggttgcgaaaattttctcccattttgtaggttgcctgctcactctgatggtagtttcttttgctgtgcagaagctctttagtttcattagatcccatttgtcaattttggcttttgttgccattgcttttggtgttttagacatgaagtccttgcccatgcctatgtcctgaatggtactgcctaggttttcttctagggtttttatggttttaggtctaacgtttaagtctttaatccaacttgaattgatttttgtataaggtgtaaggaagggatccagtttcagctttctacatatggctagcccgttttcccagcaccatttattaaatagggaatcctttcctcattgcttgtttttctcaggtttgtcaaagatcagatagttgtagatatgcggcgttatttctgagggctctgttctgttccattgatctatgtctctgttttggtgccagtaccatgctgttttggttactgtagccttgtagtatagtttgaagtcaggtagtgtgatgcctccagctttgttcttttggcttaggattgacttggcgatacaaggaaagtcttaacagatgtacacaatttttgagacatataagtaggttttttctccaataaacagatgtttataaaggatttgtatgtgccattatgataaactacaaagataaatacacatgctctgttctctaagagttttccagccaataaaaatttacagctactctttattgtccaccatactctgttatgagccatgggctttagtaagttctcatgacattgggcactgacttcctgggagtgtaagtgactcacctggaccccacagccagtgagcattagtgcttatattccatcctccaaagctctttcttcataccagaccacacatgtggcccaaggagggatatttactctgcacttttagagttctaaaaaacattgtttagtggtctggcatcatctatatttacttggcttgatttgggatagagtataatcctagtcctcgacgaaaggattttgatgagttaaccttacggggtgatgggatttatgggattatttccacccttaaaatgatttgtgggaaaaaaaagtgtactaatccctaatttaggattaagacagatatacctatgagatatgggtctataaaattcatcataatttgagaaatgcaacaaataatcacctctaaaatatcttgttggttcagttattttagtccaaaagccagttggagatctgttctgtatcaagggctccagccctcttgtgagaggtagctgtttttcattcgcttgtagtcttgaagtaaaaacaatgtcagggatggtctcctcagaaccccagagggtctgccttttaggaagtgtttgtcccctcagaaacgagaaaccagatgagctgagtttaggggtcagaccagaggaaatggctggaaattagaggtctcctggctaattcacatgatgccaaataacagtctttctgttgggtgtcagaatccagaatggtgggaaatttgtatctaggggatataaaagaaaatgaatgagataatatatgcaaacagatgagtagagtgcctgaaatgtactaatagccttcagtagattccttctccaatttcaccccttctccatctcaggtttggctttcccctggacctgtcaatacaaaccctgagagtttgattgaacaatggcactgtatggtcaatgctaccagactctttaacatgccttgtttgccacaatttcattgaatgggagcagaatggcaaccaaaccaaggctaacagactttgtcctagaattcccacaccaagtaggaagcataaaataacttagagacttgactatagttcctgcatctattagtcatggtgtgttagcagaacacaatctcagaaagttatttcctaaatgccttccaaagccttggttcttcatgcagatagttttggccaactgtaatggcagtgagaaactcacgagtgtccagaagaacagaatttatactttaagtttaactttgttttgtattgaatgttccttaaaaataaaccttcacctgattcttattttcatttcaattccatgggctggtgatttgagtgtcagggatagagttcttagaatctgtttatgtggtgtgaatacagaaatggtctgattctgagtattaggatcatgatcagagttttgatataaactcaaaacctcactaagccacgtgttattttttgaagcatagaaattggactttgcaaacaaccaaaatccttttgtttgagaaactctaaataagcattgagttttcttgccatgaagttttacactgtatctagaaagtttctttgaaaaattcctctgtaaacctaaggctgacaaagaagttggctagttgaagggaaaatgatacttatgttttgtggcaagggggaacaaaaggagggggaaaagtaattactgtccacttaacattttatatgaaatttctaatgcataattttcaagacgggcaagagttttggtttgttttaaccaaatatagttacaatattaaatacgtgttctaaatccagcatgtgaatatcacttcttcaaaaaaatttttaatttttttaattgaaaaataaatatatgtatttatggtgtacaacgtgatgctttgaaatatgtatatatcgtagaatagctaaatgatgctaatttacatatgcattaccttacatattcatcatttttttgtggtgagagcacttaaaatctgctgccttagaaatttacaaggacacaatgttattaactacagttaccatgttgtacaatagatatcttaaacttattcctgctgtctaaccgaaattttgtatcctttcaccaacatttccccaacccctcatcccccaactcctcaccagtaaccatcattctactctctgcttctgtagttcaatttttttagattctacatgtaagtgagatcatgcagtatttgtctttgtgtacctggccaatttcacttaacataacatcctctagtttcatccatgttgttgcaaatgacaggatttctttcttttttaaggctgagtagtattctattgtgtatatgtgccacttaaaaaaaatccattcatgtgtagatggacactttggctgattccaaatcttgactattgtgaataatgctgcaatgaacatgggaatgcagatatctctttgacatactgatttcatttctttgaatatatgcccataagagggattgctgaatcatatggtggctctatttttaagtttttcaggggcttccatgctgctttccgtagtggctgtaccaatttgcaatcctaccaacagtccacaagtgttccattttctccacaccttcaccaacatttatctcgtctttgtgttgataaccatcctaacagatgtgaggtgatctctcactacggttttgatttgtgtttccttgttgattaatgatgttgagcatttttaaatgtttctgttggctatttgtatttctgtatgtcttcttttgaggagtgtttccaggtcctttgcccatttttaatgggttatttgttttcttgctattgagttgagtttcttatatatactggatattagcccctcaccagatatatagttcacaaatattttctccttgtccatgagctgccttttcattgtgttgtttcccttgctatgcagaagctttttaatttgatgtaattccaccttttgtttgcttccttttattgcctgtgctttgggggtcatatctaaaaatattattaatgagcagcttttccccattgttttcttcaagatcaatgtcaaagaggttttcctttctgttttcttctagtttgaggacttatgtttggatttttaatccattttgagttgatttttgtgtctagtataggggtctagtttcattttttggtatgtggatatacagttttcctaacaccacttattgaaaagactatcaatttattaaagaaaagttttgatttgttttatccaaacacagttacaatgttagatgtgtgttggaaaccagcatgcgaatgtcacctcaacaaattttaacaacagaagggatgggaacagcaaggggatgaggaaataaacagaacataggatttaacaatcaatgggatattaacacatttatgcctgaggttgcaattttttgcatttttgcaatcagaccttgcaatgaccttgagcagtaagatataataactcccatgcttagcgttccaataatggaacactaggcataaatgggtttaagggcacttggggtcacagatgtaagcttagaaggggattaaatgtggccaatgccttgcttttgcccatttaaaaaatttcaactaattctgatgtttttctaacattctgtgattacaggatggtaagtttgcatggtggaagatcagattgggcaccaggataatggccacagggacctcagtagagctcccagtaactcaagggcaccaggagtatgtaagagtggagagagtgcacaaagaaaaacttgacccccttcataatttaagctaatgtcaatccgcctggcacttcagagtcttatttctcaaaacgtggccccagaacagcttgtacccaaatgccctgtgggtctgttaaaaatttaagttcccagaagacactctaaaccagtggaatcagaacgctgggaatggggtctgagaagatacattccaaacaaatagcctaggcaattcttaggtactctcgtgattgaacctctgcaccaaagagggaaaagtataagttagaaaggaatttataagcaccatacacaaaaatagccatgactcaggcctccacatctcatttgtgctgtcacttcccctgggaagtctgatcaccccaaatgccgcattgtataatcttttttttttttttgaaatggagtgtcactctgtcgcccaggctggagtacaatggcatgatctcggctcattgcaagctccgcctcctgagttcaagtgattctcctgcctcagcctcctgagtagctgagattacaggtacctaccaccacacctggctaattttttatattgttagtagagatgaggtttcatcatgttggccaggctggtctcgaactcctgacctcaaatgatccacctacctcggcctcccaaagtgcaggaattacaatagtacttaacacactctattgaattgctggcttttctttctctttagcccatgtaatccagtgtcattcatctcctctgcttaacaaagagcttagttcatgaaagccgcccaataaatgttctttaaattaataaatgacttcatgtcttgctgttccaaaatatactccttaacctgcctgaatactttcacttcactttgccaattatttcatttggtatatcggagaattttagtttaaataatgaaatcagtcagttatccagtagggtcaattaattccactttcgctttcccaaagattgtagagcaactacacacagagaatgaggcagcagtgatgcaagtaattttgaaacacagttttagagttaaattgtttctggatgcaggcatacaataaatgggtaagtgctgcgtgggggacactgagcaccgaagagttggagggaaagccccagggagttatgaaagggagtacagggaacagggaagaaaaggaagatgtaacctacttatctaaaacttttacctagaaatgaacctgcattcagggtcatggtgggagaaaacactcctcctcctttgatggctgtgacctcctcatagttcctgaacatagcactcaagctggtcctaatcccactacatgaataagtgaaataggctttgagaaactagtctgaaaagttgatcaccctatgaaaaaatgcatgcaaaatcccagaaaacatttcaaaacttttgaaatccaaccaactcagaaattgagcaaagccaagattagatttgtcttgcagatcaacttagtgaaagcagatgttactcgtgaagacaaaggtcaggaccctagagacataacaagaaatattttatgagaaggaaacttgatgtggattgaaaggcagaagaaatgaaaagaaaaaggcacatgaacatttttaagcaattgtaacagaatgaccaaatttcctgaaccccagacatatgataaatcatataacatgaataggcccccttcaaattggtggcatgcaacatggcaaaacccatctctactaaaaatacaaaagtcagctgggcttggtggcgggcacctgtagtcccaactactcaggaggcagagacaggagaatcgcttgaacccaggaggcagaggttgcagtgagccaagatcatgtcactgcacttcagcctgggtgacacagcaagactttatctcaaaaaaaaaaaaaggttgcatgagcaatatatagtgatggtgactccagttttgccaagatataagcaagattgaagaggccagaaaatgtggatatgttagtgcaagcaaatcatcaattcttttttttttttttttttttgtatttaagttctgaggtacatgtgcagaatgtggaggtttgttacataggtatacatgtgccatggctgtttgctgcacccatcaacccgtcatctacattaggtatttctcctaacgctatccctcccctagcctcccaccccccgacaggccccggtgtgtgatgttcccctccctgtgtccatgtgttcttattgttcaactcccacttatgagtgagagcatgtagtgtttggttttctgttctggtgttggtttgctgagaatgatggtttccagcttcacccatgtccccacaaaggacatgaactcatccttttttatggatgcatagtattctatggtgtatgtgtgccacattttctttattcagtctatcattgatgggcatttgggttggttccaagtctttgctcttgtgaacagtgctgcaataaacatacatgtgcatgtgtctttatagtagaatgacttataatcctttgggtatatacccagtaatgggattgctgggtcaaatggtatttctagttctagatccttgagaaatcgccacactgtcttccacaatggttgaactaatttacactcctaccaacagtgtaaaacaaaataacatatatttattaaacatatgtgtctctgtctgtgtgtgttacacttaggcacataaaagatatttaacaaacattgttgaatggataaatgactgaatgagcagctactatgtgtcaggtgctagaaatagccaaaatgttctaaaagactgtggggaattagcaattccttttagaacaggggtccccaaccctggggccatgaaccagtacctgtccgtggtctgttagaaaccaggccacatagaggaagtgagtggcaggtgagtgagcgaagcttcatctgtattttacagctgctccccatccctcacattaccacctgagctctgcctcctgtcagatcagcagtggcattagattcttataggaaagtgaaccctattgtgaactgcacatgcgagggacctagactgcgtgttccttatgagaatctaatgcctgatgatctgaggtggaactgaggcagcgatgctagcactcagcagcagctgcaaatacaggttaacatcagcagagaggcttgactgcatagaaaccataataaatcaattgcttgcagactcatatcaaaaccctaaaagtgagtgacatgtgacaagtaagctgcatctggtggcaagctttatagtggcaagtgagttgatgtacttcaattgtacagctgcatctggtatccttaaaagtatgtttcagacaatttcaaatctccatatgttctggattaaagtcaaggcagaatatcctgagattgctacaaaagctctgaaaagcctgcttccatttccaacatcctatctttgtgaagcagggttttctgcagtgacagcaaccaaaatgagattacagagtagactggacataagcaacacactttgggtgtcactgtctcccatcacccacagatgggaccatctagttgcaggaaaacaagctcggggctcccactgactccacattatggtgagttgcataattatttcactatgtattaccatgtaataataatagaaataacatgcacaatacatgtaatatgcttgattcatcccagaaccatccccccgaccctgccagtctgtggaaaaattgtcttccatgaaactggtccctggtaccaaaaaggttgggaaccgctgctctagaatgttccccttggctggggagtccctgatcaaccactgaggctctgcttaagtgttccctcccctgcaaagtctactatcaccctaattaattactattccactgaaaagctcatcccaccatcttacactggttagatgttttacctgcttgtcttcctcactaggataaggggaaaaaagattctgggtttgttccgtatttgttttccccaaatctactgtttgtaatagggaaagggagaaaggaaaggcataagaaagagaagagaggacagtaggcgggaaagaaggagagcaaggtgagataaatcatgttcttttgcccctaaggaaattatgttacatggtaggtttgttgctagatactgagaccctgattctaccttatattcaatggacattgtttaattacatttattgctttaccactctggaaagaaatgtattaatttaaaatgttttggatcaattatttctttttattacagttcttacggcttattgaaaccactcagcacacttttagatatgtaaaatgtatgatctgagtcatgataaaaagaaatttcataggtaacagcatcagtaaatatgtggctgcactttcagtgctgacctacctatattcttttctgagtttacaacctcagttatcaacaactgacattactcaatagttggcacatggcatccaatgcatggacttgaaagtaggctttaaaattacagtaatcggccgcgtgtggtggctcatgcctgtaatcccagcactttgggaggcggaagcgggcagatcacgaggtcaggagatcaaaaccatcctggctaacatggtgaaaccccgtctctactaaaaacacacacacaaaaaaaaaaaccaggcgtggtggcgggtgcctgtagtcccagctacttgggaggctgaggcaagagaatggcgtgaacccgagaggcggagcttgcagtgagctgagatagtgccactgcactccagcctgggcaacaaagcgagactccgtctcaaaaacaaaaacaaaacaaacaacaaaaaaattacagtaattactgtgggcatgataattgtatgtgtcaacttgtgttgtgcgccacagtgtttccagatatttggtcaaagagttttctggctgtggctgagggggtgtcttcgatgagattaacatttgcatcagcagactgagtgctgtgatttgaatgtttgtgtcctcctctccccagaattcatttattgaaactaacccttaatatggtggtattaagatgtggggtgtttggggccgggcacggtggctcacacctgtaataccagcactttgggaggctgaagcaggtggattacgaggtcaggagatcgagaccatcctggccaacatggtgaaaccccatctctactaaaaatacaaaaattagccgggcatggtggcacatacctgtagtcccagctacttgggaggctgaggcacaagaatcgcttgaacccgggaggcacaggttgcagggagccaagatcacgccactgcactccagcccaggtgacaaagcgagacttcatctcaaaagaacaaaaaaaaagatgtggggcgtttgggaggtgattgggtcatgaaggtggagcgctcattaatgagattattaaggagattactgcccttagaaaacagcccaagaagtctatgtgctccttctgccatctaaggacacagctagaaggcaccaaagagcaagtccccaccagacactcaatttgctgtgtgcatgtggagatctcttggtgctttgatcttgggcttcccagtttctagaaggtgagaaataaatttctattgtccataaattactcagtttaacatattctgttatagcagcccaatggactaagacactgagtaaagcagattgacctgaataggctataaatggaaaggaaaacttttcctgcctgactgcttgatctgggacatcagtctttatctgtcttctaactcaaactaaaacgtcagccctttggggagtctcaagcctactggcttgagataaggggaaagacccacccccatgattcaattaccttccactgagtccctcccacagcacatgggaattcaagataaatttgggtggggacacagccaaaccacatcatcagggttttcttacatagtgttgataatcctttccagggtactgggtgtaatgagccttaaaggtctttaggaccctgatgtaaagactaaattaaagatgtgtgtttgggggcaagtagaccacttcagcacctccagtgttgaactcatggagttctgggtggccaggggcattgttcaatatcaaaagaaccttaaatggcagtcccttactggcaaggtacctcctgacttgagggacaaagcataaatggagtcaatccagaaaaagagttctcattgtacaggccttcttgtacaaccaaaagattggcaggtggtgtttaacttttcccttcaaggctcaggggttagctgctttatagataagggcagtccttatcataaaccgaactgcatttgcacaaaacagtagaggtagcccatctcttcctgccttaaatcctggtgctcacttctttttcttactaataaatgtccttcatggcatttttttgcagaacagggcacctttatttgcattaaaaacctatttagtacacctactatgtaccccctaaaattttaaaaaattaaaatctatttaggcagatattcttctcagtgattgtcttaatggtgcctgggaactcatctgctgcctgttggttggcaaaacctgattctcctgttatcgtcacatttttaaaaccaaacatcgttctaaaactatcacaccatcttttgctggcattaaattcttcagctttagttcctttaacttcattttactttaagttgttatatgacttcactttttttcaaataataatagagtatttaggcatgcttttttttttttttttttagatggagtcttgctctgtcaccagtctggagtgcagtggcgcaatctcggctcactgcaacctccaccttccgggttcaagcgattcttctgcctcagcctcccgagtagctgggactagaggtgcacgccaccatgcctggctaattttttgtatttttgtagagacagagcttcaccattttggccaggatggtctcgatctcctgacctcatgatctgcccacctcggactcccaaagtgctgggattataggcttgggccactgtgcctggccaggtatgcctttcttatagcaattctgcaccgacataaaagctccattttcaatatgagataaaaaggtattttgcaaaaagtataagtttttatacctgctggtgtagctgcagtgacagcctcatgaattttctttcttttttaacaatgggccttgcactagattcatttatcttgaaatggcaggcaatcgcagctgcagacctccatctatggtaaatatcaagcagttcaactttttcttgtcatgatttttctctgcttcttgggagcactttcagcaacactaatagcactttgtatagatcccatggtgttattcaaggtttacagtattgcactaaatataatgaaaaataagtgagaacagtgagaggtcactttttactgtcatatggaatctactggagacacaaactgcttatacagagataattagtgacatgaaatttgaagcagatacttgcaacacctgagcttagcacaaaagcaacaggagctggctatgacatttttgcagtagtacagtatgtacagttcattgtatgcagtaatgatttaatactttatgtttgctcacatttctcttgattgtgaatggtacatgtgcagtctgtatttgggtttgaaagttttgataaattttaactttttataatagatttgtatgtattttatcataatgtatgataaaatagatgagtatctccctagcttttttcttaatttctttttatatttccaggccatatggttcaactgcaagtttttaaaaattgttgcagatctccataaaaggattcaatatgtttattttttaaaattgtgtataattaaacttgcaattcaaagatagacttgaaccctaattattccaatggataaatcagtataaatatgtagttatttttttttaacatgagaagagatgggaagttggtttcggacaaatctgaagctgtttctatcatattctataatattggtttgtttccttgatatttatgtatctttcacataaaaataaaatataatagacaatacattaaactgggagcccagaaactttggttctaggattgaattatatgtgagacattcaataaatcactgaaccttctaggcttgagttccctcactttgaaagtgaaaggatgaaatatttagtttcaggatactaaagacatcttgatccctaaactgctttctggaaaaaagccaaaagcaacaaggaaatttagcagtacacactcccatctgtcattattagaaaatcttcattaacttcaaccataatatatatgaagaaaggctggcaagtatagtgaatttggaccagagagaggcaagaaactgaaagaagatggttactggacctcaaaggatgacagtgcagaggtctttgaagtaggtgatacacatcaaggggtaagacatgatagaacaagatggatggcctcaaggagctcctgaaaccccacaagaaacccctccaatgcaggggatgtgatgacaaatgaagacacatgcagacaagctaactctacaagaaactatctgtttggaagaccagatgagaaactgaatgataagcagcttgaggctgtcaatctttatccgccattgaatgtaaactccagggaggcagaaattttttttctgatttatctattgctatattctccaaacctagagcagtacctggcacaaagtaggtgcacaataaatatttgtatgatggatggatgagtaaagaaagattacagctaaaccacacaatcgacatacttgtgtgtatgtgtgtgtgtgtatgcacacgcatgcaaacaagcaaacattaccgtgtcacctctagagaaaaatcccttcattattgaaaaggaattaacataggatttatgcaaaaataaccctatttacataaagaagcaagccaacaaaacaaataaaaatcataaaaagggcaaccaccaaaaatatttttattgccctagagaaggtaaaacttgtgaccaaagttatctgtgagttcataaaacttaatgaataaggtgacctttctgtgttaggactccagagtgaagataagaagtctcaaatttaaaaaaagataaggcaataaaaaatgttaaaaaaaggtatttggtagatcttgggatagaagtaaaagagcaaaataaaagcatcaaagaaataaaagctttgggccaggcacagtggctcacacctgtaatcccagcactttggaaggtagaggcaggcagatcacctgaggtcaggagttcaagaccagcctggccaacacagtgaaacctcgtctctactaaaaatacaaaaattagctgggtgtggtggcgggcacctataatcccagctatttgggaggctgaggcaggggaatcacttgaacctgggaggcggaggttgcagtgagccgagatcacgccactgcactccagcctgggcaacaagagtgaaactccatctcaaaaaaaaaaaaaaaaaaagaaaggccttaatgggaacagcaatgttgcccatgttgaaaatataagtgaagacattcatgacatcttgagaaagtggagcaaaatgaaatagaaaagaaaaaagactagagtaggaaaaaattgtagatcgagaacacaggggaaattgaacaggtacaacacattggatttttattagaaattatatgtaaaacattcaatattcttgtttttaaagacaaaatcagaaaaaaatggagaacaaaaatatccaaagttatatcaaaaaactcctgaaataagagatttgaatctgtagaattaaaggacacacaatattccagcaaacataaatatctattaatttccatgcataatctagtaaagttaaggaacttcaaagaaaaataaagaacccaagagtatctaaaaaaggtgagagcataaatatcttatctgaaaagcaaaagaattaagctagcttcaaatttctctccattcagtgctaggaataatgaaatcatcaagttctcagggtaacaaagtatgatccctaaattttatacccagacacaccaggcttgtttcttctgtccatctgtgcaataactttttcaaatgtgtaaaacgtaggggaaaaaaacctacatgagctttaaaaaagctgttagccaactaggtcaaccaagatataaatgatgagctatgagcattaagtcattttaaatttaaaactaaggttaaaatgacttcaggaaattagggtgtgcagaacagaatagaaatgtaataagttatccctttataaaaataatataactaacaaaaatcaggagcaagagggaaatgaaaatgggagataatttaagtaccaatcttctcatttttaaatatattgtttaaggctgatctgagactaaggctgatctaagattaagcacataactaaccaaaatgagtgtagcagaaaagaaaagcaagaagatggaagtaactggacatattctaaaagcatcattcatagtgagaaattaataggtactgtttaaaggaagagagaccttacgatattacataaagttatatcttacaaagtaacaaattactagaggaactcaagtagatcataagcctttcatattatgaaaaattgaccttagaaatcacagaccaatggtaaaatattaaaaacaaagtgtaatgaacttatccttccaggaatgctggtttacatcacataaaccactcctggtaagaaaaattagcaaagcaggattaaaaaaaatttaatcacaaaatagtaaacaattatgaaacaaagaggagaaaaagggaaatcagagaggtaaatcctaggaatgtgattcaaggaatagttgagcagaggtttggcagcactatagggctagacagtaagaaaaaaaaatctatcaagaaaggatctctgataaaccccctacattgagttgggatcccaaagggctccatctagtagtaaggggtagctggaaaaaaaacttgggacagaagtccagttttcaaccatcttagttcctctaattggattacggtaatataagattgctagtccccctaaccaactgccatgagcaaatggaaatcctaccaggaaatacaattttaggcttcaaatgatttcaacactttttgtatacaacatcttgcacacaataaaaagtaaccagacaaatgagaagagaagatgatgtaataaaaaattgagagaaataccagcaacagaaatgaatgcacaggagattcagaatatgaataatcagacattttacaatttttaatagagaaaatttttttaaacccaaaatggattctttgaaaagactaataaaattgataaacctttggtaaggttgattgaggaaataaagaatcagaaataaaaaaggagtctattatcacagagcctatagatatttttaaattatattatttaaatatattaactttatgtctctaaatttgaaatttttaataaaatggatatatttctataaaaaacaatttaccaaaactgacacatgaagaaatagaaaatatgaatcattctgtaacctttaaaagaattaaaaaccataacaaaggccatcatgatttccccagagttatttaactcccttttcccatgtaaaatttacttccaaatctttgagaaggcattccttacttcagcaataggaatcttcagggttttttttaattatgaggacatattttcccttcctcatcttatttaactcagtgttataaaactgttctatgatttacttttgaggattatatatattagcttctcatatatttcataccctaggagtttagatcatatagcatgatagtgaagggagaaagggagaaaagtgggagacatggaaggggagtgaaaagagagctgtcctgatttggattgttacagttccatatctgcacccccagcagtttatttatgatggagagaaaataagtaaaaatatatgtgacttgattttcagtttgaaaatgtgttaatgagaaaaaaacccaaatcaatctaattctttatgcttactttatggaaataaaaaatttctgtactatgtggtagaaatgagtgtgtgccattctgggaaactgttcttcagactacctggtgacctatcagttaatcaaagcatttgacattttttctaaagaaaagagggtgaaataataacttggcctttcttaaaaaaatatacccatggattctgcatccttgccagttgtctattacatagtttgttgagactgcccaacgttgtctggaatttccaagcctcagcgctataaaaataattcactagaactgcctcaaaataatttatatcgtgtaagtacttaacactgcactttggactacagtatgtgatggatatgctaggaattatgctgggttcagtgagagttctgcacaaaggcctcttttgccgtaactaccaggttcttgatgtttaaggaattgtgttgataggccctagaaacttaggacctacaattactggagcatatttattgcagcacagaagagagttgatggtggctgatacaatattggtataaacaaggtcactagtgttccagtatgaacattcaagagcccttagggaaaacaaagaagtcactttcacaaagaactttcaattgcctgctctctgatactaaaacagaatttaaaaatgaacctagttcattttttttcttgtctcttggctaaaagaccacagaaaactgatccttcacttaatttcaagcaaaaattgtattgtttttggtgaaatccattttttacctcaaggattcagcctaaggttatcacatcaaaatatattttctttaaaaatctgaagtttggccttgaattttcaaggaaattctgcttgaattattatatgggatgaaatatttaagtattactctttttttctctctttcaatgaattaagacaaatacaagcaccttttaaaaatcaggcagggaaataaatgctaattaaattctcttaccagtagtttttcattttgtgaaacaaacttttctagatcggatagactttactgatgagtgtttttgataatgctgaatggaattgagtatgacctcccagatacagatgcatttggacttctcatccacttagtctttttcattcaaactggaaaatcatgtggtttcatttttattatttttttaattgagaggattgtcaggagaaaatatgtatgtggctttatttttattttaaccaataagattgtcagtaggaaatgcattctgaatatagcacacatggggcaaatgttcctttttggtcatgacattttttcattataatgggggtttgccagggcatataccatgttttaatgccttttacatataaaatcacaacaagataagactttagacctctctgtaaaagctgcggtataatgggaactagcatgctctgactggttgcctcaattaataaaacaatcaggaaatctcgagggtttccttccacagatttgagtatcccttgatgacctgcataaaccctagttcttataaatctgttcactctcctgcaccggaggaaggggagatggaaagctggcctgttggtgacatacacagcattatgcttagaaaagtatgggtttcttccatgctaccatcctactcttggcatgaaattatactttgtgatcctacagtcatacatttgaaggaactacacacataggagacagcgtgaccctaggctctgactgggtatctttgtttatattttgataaagaagtttatggaaaaagttatttttaattgaacaataatttgaggcatggtaaaaaaatatgtattgtctaggaattattatttaatatttagaaaaaaacatgaggctttaacttgaagaaataaatatattttcagggaaaatctatgttgtttcttatttatttgcactttggtactctagaacaccattaggatgtcttgtttcagattttaaaggtaggtattatccctgtgatccttcgtgtgcaaactagcttagcaacctgcccccaggagagtaaccacagagccagtggatctatcccatgctcccttgcatgaaccagcctggcactttgcccacagggaagcagcgccagaaccagcaaactagccacacaaactctagtagcctaggtcacagaggcacttataggcatcactgacattgactatagaaacttcagagaggctacactactgtcctcaccgagaaccaaagccaatgcactctacccaactgactccctaggacacaccttcaggtgaaagtcttcccctctggaagctactgtataaaactggaagaggcaattcttccaccagatgcacaggtatcaacagagggacacaagaaacacgacactgccatataagcacagtgattccccagttacttaacacaaagaaatagaaatttatgaatcttaaggaaactcagatacaagagaacatagatagacatttcaaatacattgggaagataatttatgttctgtatgagaaattgaacaaagagatagatatcattaaaaagaaccaaacaaacttccacttgagcagcctgagacatccatgggtgggggtattttctccctcaactgttcctaccacaggctttctgaggtttttcctagtgaggccaagagggtctttgaggaaaactgcatccagacatgccttgagggaaggtgtcaaatgcaggagcatggaaaagagttacaatttggatatgaaaccatttttctagcccaccttagagaagactgttgacacactggtcaaaatggttccaatcgcctaccttgcaagacacttcaggttcaaagaatttcccttgtaaaagcaacaagggaggtgtcggagttttccatttagatcaacaaattcaagttcttaccatggaaaattcagagaagactgtagtggttctccttgcttgtggctccttcaatcctgtcaccaacatgcacctcaggttgtttgaactagccaaggactgcatgaattgaacaggaagatagagagttgtggaaggcataatctctcccgttggtgatgcatacaagaagaagggactcatgcctgcccatcaccaggacatcatggcagaacttgccaccaagaattccaaattggtggaagttgatacatggaaaaattttcagaaggagtggatagagactgttaagatgctaagacactatcaagataaactggaggctagtgactgtgatcaacagcagaactcacctacactagaaaggcctggacgaaagaggaattccatgagctgaacaaagacaagcttctagtcaaaagagatccctagagccaaaaacaaaaggtgcaccaaaagtcaagctgctgtgtggggcagatttactggagtcctttggtgttcccaatttctggaagagtgaagacatcacccaaatcatggcagactatgggctcatatgcattactcaagctggaaatgctgctcagaaattcatctatgaatctgatgtgctatgcaaacactggagcaacattcatgtggtgaatgaatggatcactaatgatatctcatccacaaaaatccgaagagccctcagaaggggccagagcatccactacttggtactagatcttgtccaagaatacatcgaaaagcataatttgtacagctccaagagtgaagacactccgagagtgaagacagtgaagacagctccgaaagtgaatgacaggggccatcctggccactttacagagaaacactgcagaagctaaggcatagaaattctgcagcataatgttttgcactttcctttcagggtttgaaacaatctgggtgttaataactgggaaaagaaattgtggtcctgttgcataaactaaagattaaaagtttagtaaaaatcagtggtaagttaaaatcagggtttttttttttttctttttatcagaagttgctaagatgaatgttttccatatggtctttttctaaaaaaaaaaaaaaatgtacaattctctttatctttaaaccaagagcttagcagcacacaaaaaccagaagaattttcagtgaaactagctacaaataagaaatcaaaaagtacagcctagctctaccacacaaaagaagcaaagtgtgaaaagcaaaagttcacttaaaattctaatttaggttatgaagagaattgacattttatgcatgcctgctgtgggtaatctgcagctagggtagacaaaggaaggaattcttatagtggtgatcttgtaaaatgcaccattgataaatcatctccagttatgcaaaataaaggttgtgcatatgcctggcagaaacattgtaccaatagttagttctctgtggcacacatcacaattgctgactaaagtttggcaagacctatctgcctggagcttcctctttagaagtaggaagtgaagtccaagccctcatatgtttagaaaagtatgcaagttttctgatgcctaccagaggtagagacctgctgccttatactttatacacagttacttttccttgttatgggtcatgctctagccttggtcatccaccctctctttaccttcagaaacaatttcagagttgacatcatgctaccttgaattgagagaaccacagagaatgagaagtctattcaaggattttatgtctgaatgctcttagcctttattgatagcttaatcagaagatctaagtggggtgcagtggcacatgctctgtagtcccatctacctgagaggctggagcagaaggatcacttgagcccaggagtttgacaccagcctgggcaaaatagtgagaactcattttttaaaactctgaagtttctgaagggccctgctgtttctgttccagccaactgtgaatctgccatttgtgaatttaagcagaaaaagggtctgttttctcatattttttttcttcttgtccttttgtatgaagtttaacctaaagtagtattctcaaataattagtcatagcttcatgttaaaaacacatgcttgttacatggttttccactgattaaacttttgtggaaatttcaccaattgctaaagcagaaagaccagaaatagctttttatagaatcgttttggggtttgcgaaaattgtcccatgatagaaacaggactaaagttaaatttctaatgaaaatataataatttgcctttttgcaatttctatttcattcctacacaaacccagatgaagggtttgtaactccagaagaaaaaaaatacttagatatgtgcaattgtatagtcagatctgaatctacagtttaaaaaataaaaatgttaaataaagttaagcaaatatatgtgcttcaactcccaacttactcttactaaagccttcaggccaattcccaaaaacagggagggtgcaaagcctgacacctagcagctttcaggatccatctgccaagtgaatgaaaggttggaatctcaaatcctacatctgtaggatgacttatctaagagtcatttttctcctcctcagcttcttggagtttaagagttgaaggggccctgaaaagtaatgattgagcatgaagaagctataagaattgaactttgataccttctgggaaataatacacagtttatctgaagtgttgtgtaaactgcagaaaggttccaatgctagaaaattctctcatactgtcatgcctttccacttagaagtgcccatgccctgcgtagctgtgactctactgacctcaggacctcactgggcaaggcatgtggtaacccttgcaggagacctgataatggtgaaatgattctattgctatattatttatggagcaacaactttgtacagagaacgagctgcttggctttttcttccaatgccaaggatgctgctgatgctgccatgtaacagcatacttttgggtgtcctcaaggatagaacttcccctctgaataatggaaattagaacaatgaacttcacaggggaataaatattaatgaccgatgtgaagaaaatattccattgtttattccctaccacatcatttccataattggctgttgtactgtgaatttagaggaaatgggtaatgcttgtgttttgttttgcttgtttgtttgatgctgggggttttatgtgttgtacactttaccccttacattgcataatttgaatgcagcaaacaaacccgcaataaaagtcatttattggcatcttcattcagatgaatggagagcctttgtggtagtgtcaaaaaaaataaaaataataaaaataaaaagaaccaaacagaaattttggagctgaaaaatttaactaataaaatgaagaaatacaattcagagcttcaatagcagactaaattaagcagaagacaaaaatttgtgaacttaaagacaggtcttttcaaataacctagtcagagatccaaaagaaaaaagaataaaaagaacaaccaaggccagctggacttctgggacaccaactaagcaaacaaatatttgcattatgggatttccataggacaaaagatgaagagagacacagaaaggttacttaaaaaaacaatagttaaaaacttcccaagtctttggagagatatgtacatccagctccatgaagcacaaagaatcccaaacagattcaacccaaagaggttctctccaaagcacatttaaatcaaatcatcaaaagttaaagacagaattccaaaagcagcgagagaagagaatcaagttacatataagggaatccccactagactatcagcagatttctcaacaaaaactgcaggccaagaaagaaccagataataaattcaaagtgcttaaagaggtgaggtgggggtgcgggggaactgtctacctagaatactacacccagaaaatttatacttcagaaatgaaggagaaatagtgtttctaggcaagagaaagctgagggaatccatcactgctagaccagccatataagaaatgctagagagaatgcttcaactggatgtattaggaaaataattactagtatgaaaaaaagaaagtataatctcatcggtatgagtaaatttattatcaaatttagaatactccattactgtaatggtggtatataaactttcagttgtctagtttgaagattaaaagtcaaaatggtcaatgattactatagctacaacaagttgttaaaatacgtacaggatatgaaaagatacaaggtaagcaacaaagttataaatttggtgggggaggccaggtgcagtagctcatgcctataatcccaacactttgggaggccgaggtgggtggatcacctgaggtcaagagtttgagaccagcctgaccaaaatggtgaaaccgcatctctactaaaaatacaaaaattagctgggtgtggtggtgtgtgcctgcagtcccaggtactcaggaggctgaggcaggagaattgcttgaacccgggagacggacgttgcagtgagccaagattgcaccattgtactctagcccaggcaacaaagcaagactctgtctcaaaaaaaaaatgtttttaataaaaaataaacaaatttgggaggtggaaggtaagtctagaatacttgtaagtagccaaagttaagttattatcaacttaaattgtctattataactacacagtttttaaaatgtaagccccatggtaaccacaaagaaaaaaattacagcagatacacaatgaaaaagaaaaaaaaatcaaagtttatcactacaaaaaaaatcaccaaaccacacaggtaaactataagagagggcaaaaggaacaaaggaaatacaaaaaaaaaaaaacacaaaatgatttaacaaaatgtcaagagtaagttcttacctatcaataataaccttgaatgtaaatgaattaaattttccaattaaaagatatagagtggctgaatgggtagaagacaaaacccaactatatgctacctacaagagatttactttacctataaggacacacatagactgaaagcgaagggatgaaaaatgatattcaatgcaaatggaagccaaaagactacaagagtaactatacttagataacagataattcaaaaattgaaagtggagacaaagaaggtaaatctataataaaggggtcaattagcaaccaattataacaattctaaatagatatgcacccaacactggagcatatataaagcaaatattataacatctaaagagtgatacagactgcaatacaataatagtaggagatttcaacaccctactttcagcaatagatagatcatccaaactgaaaatcagcaaaaacaaaaaaacactggatttatgctgcactctagaccaaatggacctaacagatatttgcagaacatttcacccaccagcaacctacagaatacacatttttctcaaaagtatattgaattttctccacaatagattatatgttaggccacaaaacaagtctcaacaaatttttaaaaatcaaaagcatattaagtatttttctgatcacaatggaataaaattagaaactgataacaggaagaattttggaaattgtgcaaatacatggaaattaaacaacatgctcctggaaaaaccaatgggccaatcaaaatatttaaaatgaaaatttaaaatttcttgaaacaaatgaaaatggaaacacaacacacctcaatctatgggatatagcaacagcagttctaagagggaagtttatagcaataaatgcctacatcaaaaaaatagaaagatatcaaataaacaacctaacattgtacctcaaggaagtaaaaaaagaaaaaaaaaagaacaagctaaatttaaaattaagaatgaagggaataataaagatcagagcataaataagtgaaatagagactaaaaaatagaaaacatcaatgaaacaaagaattattttttaaaaagataaactaaattgacaaacctttagctagacaaagaaaaaagagataagacacagataaataaaatcagagattaaaaagaagccattacacctgataccacagaaatacagagaatcataagagacaattatgttgtgcacatgtaccctagaacttaaagtataataaaaaaataaatatatatattaaaaataaataaataaataaaaagaaatagaaaaaagaaaaaaaagaaaatctagaagacatggatattttcatggacacatataacctaccaaaattgataatagaaaatatgaacagatcaataatgagtaacaagattcaatcagtaataaaaatttccgatcacagaaaagcatgggacctgatggcttcattgctgaattctactgaatatttaaagaataattaataccaattcttttgaaactattccaaaaaactgaagaggagataaattcatctaaattcattctatgaggccagcattaccctgatacaaaaacaagacaaggacacaacaaagaaagaaaacaacaggcaaacatcctcaacaaaatacaagcaaaccaaattcaacagcaaattaaaaagatagttcaccatgaccaactgggagatggaaggatgattcatcatatgcaaatcaataagcatcatacatcacattaataaaatcaatgacaaaactgatgcaaaaaaagcatttgataaaatttaaaattccttcaggataaaaatctctcaacaaattaggtatagaaggaacacaccttaacatgataaaggccaaatatgataattccacagctaacatcatactgaacacggaaaagttcaaagcttctcctctaagatctggaacaagacaagcatgcccactttcaacactttcatctacccagagcaattaggaaagagaaagaaataaagggtatccaaatggaaaaggaggaactcaaactgtccctgttttcatataacataattttatatatttaaaaaaaccctaaagatgccaccataaaactattagaactaataaacaaatttagtaaagttgcaggatacaaaatcaacatacaaaaatcagtagcacttctatgtgccaataaaaaactatctgaaaaataaaccaaaaaagcaatcccatttacaacagttacaagaaaaaagatacttaggaatacatttaaccaagaaggtgaaaaatttctacaattgaaattataaaatgttgatgatgaaattgaagaggacacaagtaaatggataaagatatcttgagttcattgattagaagaattaatattaaaatgtctatactactcccaaaagatctacagattcaatgaaatccttatcaaaattccaatgacagtttttcaaagaaatagaaaaaaatcctaaattcatatgaaaccacaaaacatcttgaatatccaaagcaattttgagtaaaaagaaaaaagctgacggcatcatactagctgacttcaagataaactacaaagctatagtaaccaaaacagcatggcactggcattaaaatagacacatagaccaatggaacagaacagagatcacagaaataaatccacgcacttaaagccaattgattttcaacaaacatgccatgaatacacattggggaaagaagagtctcttcaaaaaattgttctgggaaaactggatatccacaagcagaagaatgaaagtagacccggtctttcatcatatacaaaaaatcaaatcaatattgactagaagcttaaatcaacactaatgataaaattactagaataaaacatagggaaatccctttatgacactggcctaggcaaagattttttttataacatctgaaaagcataggcaacaaaagcaaaaattgataaatgggattacatcaaactaaaaacttctgcacagcaaagtcaacaattaacaaagtggagagacgacatacagaatgggagaaaatatttgcaaagcatacatctgataaagggttaatatacggaatacaaaagaaacccaaacaactcagcaaaaaaacaaacacagtcatgttccacataacattttggtcaatgataaatgggatctaagtaaactaaagagctttggcacagtaaaagtaactatcaacagagtaaacagacaacctacagaatgggagaaaatttttgcaaattatgtatctgacaaaggtctaatatccagcatctataaggaacttaaacaaatttacaggaaaacaacaaacaacctcattaaaaagtgggcaaaggacatggacaaacacttctcaaaataagatacatccagccaatgagcctatgaaaaaaggctcaacatcactgatcattaaagaaatggaaattaaaaccacaatgagataccatctcagaccagtcagaatagctattattaaaaagtaaaaaaataacagatgctggtgaggttgtagagaaaaaggaatgcttttacactattggtgggggtgtaaattagttcagccattgtggaagaaggcgtggtgatttctcaaaaacctaaagacagaaataccattaaacccagcaatcccattactcattactaggtatatacccaaagtaatataaattattctcttataaagacatggcacacatatgttcattgcagccctattcacaataccaaagacatggaatcaacctaaatgttcatcaatgatagaatggataaaaaaatgtgttacatatacactatggaatactatgcagccataaaaaagaatgagatcatgtcctttgcagggacatggatggagctaggggcaattatccttagcaaacaaacgcaggtacagaaaaccaaatacagcatgtcctcagttataagtgggaactaaataatgagaacacatggacacacagaggggaacaaaacacactggggcctattgaagggtggaaggtaggaggagggagaggatcaggaaaaacaactaatggctattaggcctaataactgggtgatgaaataatctgtacaacaaacccccaggacacaagtttacctatggaacaaacctgcacttgtacccctgaacttaaaagttaaagaaaaattttggtcaatgatagcatatataaaagtgattcaataagaccacaatattgtattttttgtgccttttctatggttagatatgcttagatacacagatatttaccatcatgttacaattgtctacagttttcagtacagtaacatactatacaggtgtctagcctaggagcaataagctatacaatctaggtctatgtaagtacattctgtgatgttcacacaataacaacattgtgttacaatgcatttttcagaatgtattccaacccttaagtgatgcatgactgtaatctgattttaaaatgggcaaaagacctaaatagacatttctgaaatggccaacaggtatatgaaaatatgcttaacattagcaatcatcagaggaatacaaataaaagtcacaatgagatatcaccttgccccaattagaatgggtattctcaaaatactaaaaaatgacaaatgctagtatagatgtggagaaaagagaactctcatacacttttggtggtaaattaggacagccattatggaaaacagtatgaagtttcctcaaaaaattaaaactagaaccatcatatgatccagcaagctcactattgtgtatatgttcaaaggaaatgaaatcagtatggcaaagagatatctgcactctcgtgtttattgcagcactattcacaaaagccaagatatggaatcagcctaagtgttcatcaagagatgaataaacaaactgtcacaaatatacacaatggaatgatnnnnnnnnnntacagtgtagggaagtggtgaccaccggcagaagagtgtaggggtaagaggaggatggggagagattagtcaatgggtacaaagttacagttggataggagaaataagttctgtgttctgttgtacagtagggtgactatagttaatgacattgcattgtatatttcaaaatagctaagatagagcgttttcaatgttctcacaacaaagaaatgataaatgtataaggtaattgatatgctaaatgccctgatttggtcattacacaactatacatgtactgaaacttcaccctgtacctgataaatatgtacaattataatgtgtcagtaaaaaacaaaacaaacataagaaccatatatgaaaaacccacagccaatatcatactgaatgggcaaaagctggaaataattcccttgaaaactggcccaagacaaggatgccctctctcaccactcctattcaacatagtattggaagttctagggcactcaggcaagagaaagaaatagagtattcagattcaaagagaagaagtcaaattatctttgtttgtagataacatgatcctatatctagaaaaccccatagtttcagcccaaaagcttcttaagctgataagcaacttcagcaaattctcaggatataaaatcaatattcaaaaatcactagcattcctgtacacaaacaacaggcaagcagagagccaaatcacgaatgaactcccattcacaactgctacaaaaagaataaaatacctaagaatacagctaaccagggaggtgtaaagtctctacaaggagaactacaaaccactgctcaaagaaatcatagaggacataaacaaatggaaaaacattccatgctcatggatagaaagaatcaatattgtgaaaatggtcatactgcccaaagtaatttatagattcaatgctattcccattaaactaccattgacatgctacacagaattagaaaaaactattttaaaattaatatgaaaccaaacagagcccaaatagccaagacaatactaagcaaaaagaacaaagctggaggcatcatgctacctaacttcaaactacacaacaaggctacagtaatgaaaacagcatggtactgggacaagaacagacacatagaccaatggaacagaaaaaaagaactcggaaataagtccacacacttacaaccatctgatcttcaacaaacttggcaaaaacaagcaatggggaaatgattccctatttaataaatggtgctgagagtcctggctagccatatgcagaaaactgaaactggaccccttcctnnnnnnnnnnnnnnnnnnnnnnnnnnnnnnnnnnnnnnnnnnnnnnnnnnnnnnnnnnnnnnnnnnnnnnnnnnnnnnnnnnnnnnnnnnnnnnnnnnnnnnnnnnnnnnnnnnnnnnnnnnnnnnnnnnnnnnnnnnnnnnnnnnnnnnnnnnnnnnnnnnnnnnnnnnnnnnnnnnnnnnnnnnnnnnnnnnnnnnnnnnnnnnnnnnnnnnnnnnnnnnnnnnnnnnnnnnnnnnnnnnnnnnnnnnnnnnnnnnnnnnnnnnnnnnnnnnnnnnnnnnnnnnnnnnnnnnnnnnnnnnnnnnnnnnnnnnnnnnnnnnnnnnnnnnnnnnnnnnnnnnnnnnnnnnnnnnnnnnnnnnnnnnnnnnnnnnnnnnnnnnnnnnnnnnnnnnnnnnnnnnnnnnnnnnnnnnnnnnnnnnnnnnnnnnnnnnnnnnnnnnnnnnnnnnnnnnnnnnnnnnnnnnnnnnnnnnnnnnnnnnnnnnnnnnnnnnnnnnnnnnnnnnnnnnnnnnnnnnnnnnnnnnnnnnnnnnnnnnnnnnnnnnnnnnnnnnnnnnnnnnnnnnnnnnnnnnnnnnnnnnnnnnnnnnntaattcaaatttaatcctgaggatttggcatacttcagaacttgcacagcaaagatttctgataaaacacgaagcatttcacaaagcaaaatgacaaatgggatctattaaagtaaagagcttctgcacagcaaagaaactatcatcagagtgacagacaaccaacagaatggagaaaagtttggaatgtattcatctgacaaaggtctaatatccagaatctacaaggaactttaatttacaaaaaacaaacatcctctttaaaaagtgggcaaaggacaggaatggacacttcataaaagaagacatacatgggaccaacaatcatatgaaaaaaaggtcaacatcactgatcattagaaaaacccaaatcaaaaccacgatgaggctgggacagtggctcacgcctgtaatcccaacactttgggaggccaaggtgggcggatcacgaggtcaggagattgagaccatcctggctaacacggtgaaacctcttctctactaaaaacacaaaaaattagccaggtgtggtggcatgtgcctgcagtcccagctacttgggaggctgaggcaggagacttgcttgaacctgggaggcggaggttgcagtgagccgagattgtgccactgcactccagcctgggcaacagagcaagactctgtctcaaaaaaaaaaaaccacacacacacacacacacacacacaatgagataccatcttacaccagttcagaatggctattactaaaaagtcaaaaaaacaacagatgctggcgagattgcagagaaaaaaagaatgctatacactgttggtgagagtgtaagttagttcaactattgtggaagacagtgtggtgattcctcaacgatgtagaggcagaaacactatttgacccagcaatcccattacttagcatatacccaaagtagtataaatcattctattataaagatatgcacacatatattcactacagcactattcacaatagcaaagatgtagaatcaacctaaatgcccatcaatgacagactgaataaagaaaatgtggtacatatacaccatggaatactatgcggccataaaaaggaatgagatcatgtcctttgcagggacatggatggagttggaagatactatcctcatcatactgacgcaggaagagaaaaccaaacaccacatgttctcacttataagtgggagctgaaagatgaaaaaagagctgggtttatgtccatgtctggttttggtaacagagtaatgttggccttgtacaatgcattagggataattgccacctcttcaacttttagaaacactttgggaagattggtattagttctttatacatttggtagaattccacagtgaacccatctgatcctgggcttttcttcaatgaaagaattattatttattttaagttctgggatacacgtgtagaatgtgcaggtttgttgcataggtaaatgggtgccatggtggtttgctgcacctatcaacccgtcagctaggtattaagcccagcatcaattagctattcttcctcatgctctccctcccatggcccccaacaggctccagtgtacgtcattccccctcatgtgtccatgtgttctcatcattcagctcccacttggttttttttcatcatcactgctgtttcaatgaaaacataaattcaaaccaatttcacatttactgaataattatggaagctagaaacccacagggtaatgacacaaatacaaaatacctacctaaataatatcggacatatactgggtattttggttacctatagctacataagtatttactgtaaaatataagtttaaaacaattaccaatttaacatctctaatgatagtgtatatcaggaattggggtaagagatagctgaatcattctcatggcatcatcagagtttactcactggtattcagatgacaagtgggcttttctggagagtccaagatggcattattcacttgtctgctgccttgataaggatggctgaatgctagtctcaggtggaactttgctgcaaggcttcctctaatgtaacctcaaaatttcagaacacacttctgccacattctataatcaagcaaatgatcaaagccagcccagattcccaaagagcgaaattggtggccatgtttttacttccataatcagggagaagggcaggaaatatgatccagaacaaagagaaaaatgagttagtagcagctgacacagaatgacagagatggtggaattaacaagaaatgacattaaaacatctattgtaagtcctctaaacaacctcaaaaaaataaaagaatgcataatcacaatgagagaaatggaagacataaagaagacctaaaaggaacttctaaagttaaaaatatataaaatgaaaataactggatgagattaacatcaatgaatactacagaaggggaaaaaaatagaacttaaagacttagcaatagaaactagccaaaattaagcccagagaggggaaaaaaatacttaaaaaaacaaaaaaattgagtgcatcaattacccatatgacaatatcaagtgatctatcttgtgatctatcttacacataattggagttccagaaggaaatgagagagaaaaaaacataaagaaaaattttaatgcaacaataatcatatattttccaaatttgataaaaactttaaccccataaattcaagaacctctcaatgaatctcaggaagaataaatataaagaaaatgataccaggacataccataatcaaattgctgaaaacaagtgataaggagagtatcttaaaagtagccacatttaaaaaatacacattacctacaaaggaatgaaggttaaaagggaaacaggcttattgtcagaaacttcacaggctggaatacaacagaataacattaaagtattggaaaaaacctgtctacatagaatggtatatccagtaaaagtgtcttcctatattaaaagtaaaaatacttcctcagataagcaaaagttgagtgaagtcatttccaccagacctgtactaaaaacaaaacacattaaaggaagttcttcaagacagaaagaaaatagaaatttggatctacataaatgaaagaaagaaacaggcatagtgggtagaaaatatgtggttttaaatcaatgtataataattgaaacacacatactgaaaggaaaattaatgcaggagtgttgacacctgaaatgcaaatcaagaatgggaagaactcgctttttggccatttttcaaataaaattatttttttcctcataaacaacagcacaaacaaccgacacaaatacacacacacacacccctcccccaaaatgtttgactatggtattccatatgtctgagtagaatatataggtgataaacatatacatactatttttgaatgcctagcccattgttctgactggattgaaaatgccttaagacaattaggtcttgtctccttgaataaaattcactgacaacactttgaaattgtaacgatagatggtgaatttatgaactgccaaaaggcatgtgagaaccaagaaaaagagttaccctgtgccaaagcccacattgccatttgttaaggacagctgctatgacacatgtttgttcattggctcttttttttttttttttttttttttttttgaaacagtcttgctctgtcccccaggctggagtgcagtggcatgatctcggctcattgcaagctctgccattctcctgcctcagcctcccgagtagctgggactacaggtgcccactaccatgcccggctaattttttgtatttttagttgagaccgggtttcaccgtgttagccaggatggtctcgatctcctgacctcatgatccacccacctcagcctcccaaagtgctgggattacaggtgtgagccaccgcgcccggcctgttcattggcttttatatagaagtattaactgaatgcctgctatgtttatggacaacattgtagctaagaccccatatattataattcctgacattcactcgggactttgcaatagatagctcgcttttatatctaccttgctttctcttcataacaataaatgaggagggtggatattattatccctttttcagttgaggttaagaaagccttgactctcaactcatcaccctacttccttcactaaagctgtaatatcctttagactctgtcataaacagaagccttcaggtctcagctgaattcagttttttcatggggacttctcatatacagcagatcttccaataaggtcgttttgttataatgttgatgaaaaaaacattgattcctggccgggattactgtccatgggaagttcacacattcttcctatatctgcatgggctttcttctgttattattaatacggtttccttccacatcccaaagatgagcatactaggttcgatggcctgtctaaatggtctcaatctgatgagtgcaggggtgtatgtgcgagtgtgtcctgtaatggaatgatgtcaaaggctggttcctactttgctccaagctgccaggatgggctctggccaccagtgaccctgagctggaataagcaggttggaaaatgaatgaatgaataaatacaagttattataaaataaaaaatttttaagtacatgataatcatacaataaacaatgcagtatgaaagcacttagtgagattactatatttgttgtttgtttctgaactgcgtgatggtaggaggtgcttctgacaatgttcattttgcaaacatttattctttgattgaatctaccaccactgtgattgccctcactctctgattcaccgaaaattgagtaaatcattatcttgtttttatttttctttcttaaatgtatatatagttcacatttatttcaatgtttaatagtataagtgttttggtctttatttagaagtttggtgatgtttttgtgaccagaaatatgccacaggaatttaactcttgtttatatccattatcctatgataaaattggttttgttatacatcattttcttaaaattgtagtttccaagaacctaaccaggacattaagtgagaatgtactgtactcacgtaggtcttgtattatttcttcatagcatatagttattaaagtgagattttttaaaaaatgtttggctcccacattggtctcagcttcaggcaggcagaagctttgactctaccatagcaaccccagcactctgaataatgcctggagcatggtaggcactcaatatatgtggtctactaaatgtgtgttggttcctgaaatgcttctagatcaaaactgcatagcaagggaaggaatctgtctatggttatgtagtttcagaataccatatctatatgtactttataatgaaaagcttgcaggaaaattggctactattactttattaaatgaatttgagtcactcatcctttcttcagattattcatccataaaataacaatgtttgaaaaccatataggtattaaaacagtgctcctcaaagcccagatggttctgtgagggttgaggaagagcaaagagatatatttaattttttttcttttatttacataccaagtaaaagcactacacatattaaatggcagtccaaggctaggtttggttctgtgtccctacccaagtctcatcttgaattgtaatccccatgtgtcaagggagatatctggtgtgaggtgattggatcacagggacggtttcccccatgctattcttggtataatgagttctcacaagagctgttggtttttaaagtatttggcagttcaccctttgctctctctctcctgccgccatgaagaaggtgcttgtttgcccttcaccttccgctaccttctgccatgattgtgtttcctgaggcctcccaagccatgcagaactgtgagtcaattacccagtctcaggtatttatttatagcagtacaaaaacagactaacacagtttataataaaatattcccagtattattgaaggagcactataatgctccctaagaacttagaaacaaatgaaatcaagtaaatttttaaagtaacacacaatggatcataataaagacatataaaatctcttaagggaaacagaataacaccctacaatacgaagaaaacatccatcaggcaggagattgatcagcaataaaggcaaaggaaaagtggagtcagagatgagaactctggaaattcccaaccggtctatgtccaggagaaaggaaagttaaatcagtgttcagaacttcaggcaaggtcattttttgtatgaaacaacaatactatgctctcttagcctgagaacattttttaaaatggattcatctcctgttttgattgatttcatgatttcaggcaaacttctgaatatttcatggttccctaaaatagtctgctgagaagaaaaattggtcataccatcacgaatattcagacccatgtgacagttgtatttctcatcatcaataaattggcaaactgatttatatgtttttgtttaaaacacctagttagtgttcactatgttcctaacattgttataagtgcttctaataataatttattacatcttcatagcaactccatgtggtaggtacaatcctataaagataataatagtaaagtaatgcactttttctgttaaaaattatttttaattgacaattatatctatttatggggtacagtaggatattttgacatatgcatacattgtgggatgatcaaatcaggctaattaacaagtacaccaccctacgtatttctttgtgatgagaacacttaaaatccacccttttttcaattttgaaagatttgggagattttatgggtcctttccaagccatcacaataaagtaagtcgcacaattttattttgttttctggtgcatataaaattatgtttacactacatggtgtagtctaccagtgctaagatttctctgtagcatgcaatgctgtttgatagcattttatatgcagtggaacttctttcaaaattggagtcaatcttctcatatcctgcttctgctttatcaactaagtttatgtaatattctaaatttctttgttttcatttaaacaatattcacagcatcttcacctggactagattccatttcaagaaaccactttctttgctcattcataagaagcaactccttatcgaataaagtttcatgatgagattgcagcaattcagtcacatttcaggctctacttctaactctagttctcttgctattttcaccacatccgtagttacctcctccactgaagtttttaacccctcaaaattatccatagaagttggaattaacttcctccaaactcctgttaatgttgaaattttgaccttctcccatggattacaaatgttcttaatggtatctagaatgatgactcttttccagaaagctttaaatttaccttgtcttggtgactgtgaatactgctgcagtgaatgtggagtgcagatgtttcttcagcttactgatttttattcctttgggtggcatagctggatcatatggtatttctacttttagtttttgaaataaccttcatagtttttccaaaatagttgtactaattcacatttgcacaacacagtgtgtgaaggttcccttttctctacatccttgccaacactagctagcattcacctttttgatgatagccattcttacaggtgcagggtgatgtctcattgtggtttaatttgcatttccctgttgagtagtgatgttgagcatttttaactatatctgttggccatttatatgtcttcttctgagaagtgtctatccatgtcatttgcccatttttaatacgagtatatgtttcattgaatcatttgagttccttatatatttttgatatgagtcccttatcaaaatgaggccctttgacaatatatttgcaaatattttctcccaatctacaggttttcttttcactctgttgatggcttcctttgccatgcaaaagattttttagtttgatgcaatcccaattgtctaattttgcttttgttgcctgtgctttgggggacatacccatgaaataattgcccagaccaatgtcaaggagcttttctcctagtcttctcttatgagttttacagtttcagatcttacatttaagagtctcacccatcttgagttgattctactatcaagggagagataaagttccaattttatttttctgcatgtggatagccactttttctaacaccatttattgaagagactgttctttcctcattgtgtgttcttggcacctttgttgaaaatcaattgaccatagagatgtgcgtttatctggggactctctaccctattcgattcattgatgtgtctgtttttatggcagtaccctgcagttttggttactataactttgtgatgtattttgcaatcaggtagtttaatgccttaacctttgttatttttgctcaagattgctttggttattcaggatctattgtggctccattcaaattttaagattgttctatttctgtgaaaaatgacattggaattttgataggattgcactgaatctggagatcactttgggtagtatagacattttaacaatattaattcttccaattcatgaacacagaatatctttccatttctttgtgtcttcaatttcttttatcaatgttttatagttttcagtgtataggttcttctcctccttggttaaatttactccagagtatcttattttttatagctattgcaaatggaattgttttcttaatttttttcagatagttcattgttaccatatagaaacactactaaattttgtatgttgattttgtaacctactttactgaattttattcatcagttctaacaaatttagggggctgagggaggggagagggagagggagagagatttgtactgtaaagaattggttcacatgattatggaggctaagaggctcaagataagcagttggaaaactgaagagccaggagagccaaaggtatagtatcagtcaaagttgaaagtcctgagaaccaagagagctgatggtataaattctggtttgaatccaatggcctgagaaccaggagagcctgtggtgtagaatttagtccaagtctgaaagcaaagaaaattgatgtcccagcttaaagacaagcagagataaataatttttcttactgagccttcaattgattggatgaggcccattcacattgggaagggcaagctgctttattgagtttaccaattcaaatgtcaatctcatccagaaacatcctcacagacacaacacgaaataatgtttaagcaaatatcttcatatcccatgacccaatcaagctaacacataaaattaagcattatacttgtgtacacaaatagacatttttaacttagctgtgcatttctccaaatcatttagcaaattacaaataccaatcaagaatgctgatggaaacatacctacttgtgtgactacaagttaaaacactgataacaccaggtgttggtgaggatgtagagttgactggaactcctatacatcactggtatgagtgaacatgttacaatcactttggaaactggacgtttttgtgatagttaagtatacacttacctatgatccataaatcatattcctagatatttacccaagagcaaagagtatgtgtgtccataaaatgatttgtacatggatgttcttcatagcagctttcttcataatagccccaaactagaaacaaccatcaactagagaatgaacaaaaaaatgcatattcataattagcaataaaaatcactactgatacatgtaataacatagatttgtctcagaaacattatgttgaacaaaagaagcaaggcagaaaagtggctgatttttgattatttatgtgaagttaataaacaagcaatctgtgatgatagaagtcagaatagtagttatcctatagaagagcaggattactgatatagtttgactgtgtccccactcaaatctcatcttgaattcccacatgttgtgggagggacctggtgggaaataattgagtcatgagagcaggtctttcctgtgctgtcttcatgatagtgaataagtctcacaagatctgatggttttaaaaacaggagtttcccttcacaagttgtctctctttgcctgctgccatccatgtaagatgtgacttgctcctccttgccttccgccatgattgtgaggcctcttcagccatgtgaactgcaagtccattaaacctctttttcttcccagtcttgggtatgtctttattagcagtgtgaaaatggattaatacagtaaattggtactgggaatgggttgctgctgaaaacatacctgaaatgtggaagcgactttggaactgggtaacaggcagaggctagagcagtttcgagggctcagaagaaaacaggaaaatgtgggaaagtttggaacttcctagagacttgttgaatgctttgaccaaaatgctgacaatgatacggacaatgaaatctaggctgagatggtctcagatggagatgaggaacttgttgggaactggagcaaaggtgactcttgttatgttttagcaaagagactggcagcattttgcccttgccctagagatttgtggaactttgaacttgagagagatgattagggtatatatctctatatgtctggtggaagaaatttctaagcatcaaagcattcaagatgtgacttgggtgctgttaaaggcattcagttttaaaaaggaaaccaagcataaaagttcaaaaaattcgcagcctgacaatgcaacagaaaagaaaatcccattttctgaggagaaattcaagccagctgcagaaaattgcatgagtaatgaggagctgaatgttaatccccaagacaatgggaaaaatgtctccagggcatgtcagagaactttgtggcagcccctttcatcacagacatagaggcctgggaggaaaaaaatggcatcgtgggctgggcctagtttccctctgctgtgtgcactctagggacttagtaccctgcatcccagctgctccagctgtgactaaaaggggccaagatacagctcagaccatggcttcagaggatgcaagccccaagccttggcagcttccacatggtatagagcctgtgggtacacagaagtcaagaattgaggtttgggaacctcctcttagatttcaaaggatatatggaaatgcctggatgtccaggcagaagtttgctgcaggggtgaggcactcatgaagaatctctgctaaggcagtgcagaagggaaatttggggtggccacccccacacagagtcctcactgaggtactgcctagtggaactgtgagaagagggccaccatcccccagaccctggaatggtagatccacagaccacttgcaccatgcacctggaaaatctacagacactcaacactagcccatgaaagcagctgagagggaggctgtaccctgtaaagccacaggggcagagctgtccaacaccatgggaactcaacccttgcatcagtgtgacctggatgtgagacatggagtcaaaggagatcgttttggagctttaacatttgactgtcctgctgtatttcagacttgctgactttttggacttgtagcccctttgttttggccaatttctcccatttggaatggctgtatttacccaatacttgtatctgcattgtatctaggaagtaactagcttgcttttgattttacaggctcataggttgaagggacttgccttgtctcagatgagactttggactgtggacttttgagttaatgctgaaatgagttaagactttgggagactgttggggaggcatgattggttttgaaacataaggacatgagatttgggaggagccagggtggaatgatatggtttggctgtgtccccacccaaatcttgagttcccacatgttgtgggagggactcagtgggagggaattgaatcatgggagcaggtctttcctgtgctgttctcatgatagtgaataagcctcatgaaatccgatgattttaaagatgggagtttccctgcacaagctctctctcattacctgctgccatccatgtaagacatgacttgctcctccttgacttctgccatgattatgaggcttccttagccacatggtactgtaagtccattaaacctctttttcttcccagtctcgggtatgtctttatcagtagcgtgaaaatgaactaatacaattcctgattggaaaactacacaggaaactttcgggatgatggaaatattttatattttgatccaggcactggtctcatgggtttatgtgtacatatatgcatacatatatgtaaagtataagtatacttatatacaccgaagtatataaatatgcattgtagacttgtgcatctcactgggcgtaaagtatgccttaataaagaactgtgaaaaatagtttcaatacaaaaaattatgctaaataatgaaatgaaaccaaatttaatattttcaacaatttggagacctaaaccaatacttgtgaatagacaactctctcccagatggcctaagctgagcaatttccataagtcaaacttatcaagctattgcttgattttctggggttcagatcacacacaaaaaaagcccaaatcgaaactctgtttgaccctacataataactcacaaatccacttggattctggccagtatgccattctatttcagctgcagtgtcacaccttgcattgtagacatcatatcacctgatatttttgtatcatttgtaaataatttagcagcaacactgactaaaatttactataccacccaaaatacaaaacacaagagaatgacaagttaaaattattttattttaaaaaatagtctatatgcaaatagtcccaagtgtttaactgcatgatccttgtgggtctacacccctgattttaaatcctatgcttgctgtattctttcacagtttgccacagagtattttcttaatgcacaacagtaaaacaaattcaccaatgaaaatttattcttggctgggtgcagtggctcacacctgtaatcccagcactttgggaggccaaggcaggtggattacttgaggtcaggagtttgagaccagcctggtcaacatggtgaaaccccgtctctactgaaaaaacaaaaattagttgggtgtggtggtgggtgcctgtaataccagctactcaggaggctgaggcaggagaatcgcttgaaccccagaggcagaggttgcagtgagccaagattgcaccactgcgctccagcctgggtgacaagagtgaaactccatctcaaaaagaaaaaagaaaagaaaaaaggatttattctcaccaaaataagaacacaaggcaagtgataaatgtcacattaaattgtattaatattgcctaatttgtaatccacaacttcacaatataaaaaatctggattatttttaccaattccctctttttctactatgaatactttctatactcacatagaatagttcagtgaaatatacttggtacacctcagtgaaatactggctgattgattgacacaggtggttaatacaacaagaggcccttaagatgaagatgacattgatattaaacaaacacgcagaatcacaaaatactctcagcctgtttgccaggaggcaaataggacacacaagtgggaagtttggtgtttctggaccacacagtctctgccacggcaaagaagatcagccagcctcctcaactcagtacaattcagacatggtcatgaggtaggggctatagtgagaaatgtgttagaacccacacctacatatgcacatatgcaacacaagctatgtgtttaagattccagaaactgtgtaagaaacaagatgttggaatgttgattggatttacatgttgatgaaatttcagtcaactaagcctagtatcatgcaagattactgtgaaaagtttaattgcaccaactgctcttgtttggaacaaagaactgtcagctctctttacattaaccatatttctctcccccattgctactgcaagaaccaaaaagagagtacttaaaactgggttctacctgcaaaatctgcaagtcagtcagtcatggtttacatgcatgtcaatttttacattatattttcctaaggcagacatttgacagatataaatcttgcctcagcaaggcccaaaggaaacatttgtcatatctccaatggtcattcttgattaaagaaatcacagaaaaacaaattgaaattgcaaactcagcttgtatcttttctctcacataatttctatatcttgaagccaacttctttaaccataaaacgtgcattctccacataggatacaagactatagctgtgaactattttcccagtgagttacatatgatgccttaatcattaatagtaaatagatgtactatttgtatgaggtgaggtttttttgtcatattttagaaagaatcatcattgtcttcttattgtgaattatcaaaggcaaataaaaaacagcctcttccgtacctagcatattttcattagaaacaaattctattgtgatgcaaattctttggacaaaagtgaagcactttgaagattttctaatatttttgtcaaaagaatacacatgtagatgtgtactttgccttttccataaatattcaaaatgtattctgaaattaaaataaaatatttctataaaataaacacattcacttggtgttttttctttcatttgcatttaaagcagtaatcacaatatcacaagattctttgattaaaaggccttctcttgaaaaggtagataatagaaagaacatccagccccttgcccctagatggagggataaaaacagatagatgacaaacattctataaattaactctagccacaaaactactgcaaatcaaaacaaccacaaaacctccacaaaggttatgcacatgccggagcacatgtgtctgggggtcatgaggcatccacatattacaataaattttctccacaacccttattgtaaggttgaactattagggaaaaatggagcagatgctctctaaataaatatgatgtctttatttaatttcctagatgccatgccctcactaattatttttgttctttatttgaagggaaatagataccttagaagaaaactccttttaaatgttttcataagctcaatcaaactaatcacatgttaaaagccaggaaagaaattaaaagggagcttaagctaatatgatgaattttagagaggcaaccaagacaatttataccaaaagtcaacaaaatttacacaaactcaattatgtatttttttagattatgtgcacattactatgaaaatatccaggcaaaatgtatgaactgttaaattgcaattgaatttggcaatctatacaactagttgtcattctaataattcatttaacattattgaaatcagtattttgttccagcatgtgttataatcatgatattaactgaatttattcaacaaggagacattatttttatctcaggctgattgctagcacccacaacttcaattttgtttgatttactgtgcatattgtattattactaagacagatgctctgagacacataatccttattggtctatatatattgatgagctttctttggtaaaaaaaaatctggctgggaaaaatatcttgtttgtggaattaagcaaaacattagcatttcaaatatttttttcttttaaaacaccttatgccacaactaactcaatagtgggaaaaagatctttgttcagaaccgtatgtgtgtaaaagagagagagaattcaagaaacaggtattatatatttcagaaactcatacttcaggaaagaatagaaacattatttgaacctttagcgcaaaggctatcaaattgcacttagatgctatttctgttccaagtcaatttcttagaaaccattataatcttattctagtttcctatttaattttatatatgttatttacttttgaacacgggctaaactcaaaaacttttagtcagtgaaggttacagtttagacccatattacctacaatcttaccgaaggtgtgcccacaaaatgtttgccttacgacagctctatgagtaagactatctttgagcttaaactcaatcgccttgggtgatactcaacaggtgtgtatcttttgttttcctttggcatggcccaattttacacagagattttggtagaatgacttgttcttctcatatctttttagcttcagaatccggataactcaattaaggaaatataagtgggagaccttcaaaggagaacaagtaatttatgggacctgaatttctgaaataatattaaggcaacattgggcttcatgacaaaacaccagaggttgggaagagttgcagatttactcttttgacattcacatcacctccctccctccattttaatagatgattttaccaactaatttggtctttctgatgctttgattaggcaagttacagatatattttaatagttgcaaaaatgaatacttcaaagaaagcatagaccaaggaaatacattgttgaaaagtaacccctcagcttagagaagaaaaaatacacaatgttattctactatctataaatgaggtactaactggatgatgtgtgattaccagtgtgattaaatggcaaaaacagacacaaggagaagctaagtagtatgctgaggcattgtctttttgccaggttaatacactatgcacactgttttccatacaagattctcaagtagtaactatagtaaagagcgtaactcaaaaaatggactgcctaggtggagaggcatactggaatgcatgaaggtgtttcattatgtatgatgagaacagtctccaccttctgaagagtctccaaaaaagcaaactggaggaaaagtcacacctttaaggtgcaaatccaacaaagatgtcttaagattctgaggaagaatttgctccttgccagtcagttatttccagactgcagcatgtagatgataagatcaagatatgattgaagagacttttacttgtgcaagaaggtagtaaccatgctactatttttaatccttaagatttaaaacatgcatttaattcttttaaagatgtacttaatgtatattctgatagcattccaaggcatttccattgaaaagtacatgctataaattcagtagtcttaacatacataatacaatatattatgttgttcacacgaatgttcattgtagcacttttcacaatagcaaaaacatggaatcaacctaaatgcccatcagtgacagattggataaagaaaatgtggtacatatataccatggaatattatgcagttgtaaaaaagaacaagattatgtccttttcagggacttggatggagctggaggccattatcctccgcaaactaacagaggaacagaaaaccaaataccacatgttctcacttataagtgagagctaaatgatgagaactcatggacacaaagagaacaaacagacactggggcctgcttgaaggcagagggtgggaggagggaaaggagcagaaaaaaaataactattgggtactaggcttagtacctgagtgatgaaataatcagtacaaaaaaaaccctgacaccagtttacctatataacaaatctgcacatgtacccccaaacctaaattaaaagataaaataatcatgatttttcaatttaataaaaagaccccccaaaaaatattgcccttcagttaacaaataaagtgtgatgtgaggcaagacatattagtttactgctaattcatagatgaagtctgatgatttactttctgcatctgaatctaacaattcttattgggagaaaaaaatgtgtacatatggttctttggtatgtttgttgagtattatttttgttgattatgtatcagccaacatattgtgaaaactgtcatgctttttaataatgtgtttttataattaaggtgaattattagaaaagcccaatgattaaaactctaattatgtaactgttattttcacaggaagcttattgagactcacctgagaactattccaagtcatgcattttctaatctgcccaatatttccagaatgtaagtttttttaatataaagaaaagtttgcacttgtgatatgttattctctaaacgtgttctatcaagaaaaatacttggtattatacttgcataaatcaatggcagttatattttcaatgtatatgacaattttatgtacatgatttttatttcattttgctatatctctactccctaattcctacatgattttttaaaacctaaatcaaatttaaattcatttgattttgagcagttcataattctcgatgtattttaatatatcttggaatatggcaaaaccttagctgtaaatctctcctataaacatcccgtagtttataaagtaaacatatatacagatagacaaacatccatctgtcctagtcaccaagtcttgaatcacctttcactactaatacaaatatttacattttgttataaacgtagccagtggtttcagatctctcacgttaaaagagaattaaaaataattctaaaccttaaaaattgaattgctatccacttacagtaaggagaaaagggattttccatattgggttgacaaagagtgaatgaaatgaagcaggtctttatttcatttaattgattttgacaggcaatccagatagttcaggcatgcgaaataatataaccagaagcaacctgtacagtttttggccaaatgtactcactccgtggccattttgttagtgtttctgtcatttcagtagttctcaaccacagacgactctacccctagaagcatttagcatttttggttgctaaatgctcactagagagggggctgctactggcacctagtgggtaaaagtgaaggttgctgctgaacattctacagttcataggacagtccccacaacagaattatctagtccaaaatgtcagcagtgctgaggctgacagaccatcctactgaacatctctgcagttttttatgttgctaacaagtccttcctctttcaaattcttgcctctttgttttccttgatattcctctctcattcctcttcttgtctcagctggctactcttccttagtctccttttctgacttcctattttatttttgccagctacttaattaccagctctttctttgtatattttgttctaattcctctatgccccactctccttgagtaaacactcccattccttgggctgcactatttcctaatacagctaatttccaaatattaccacttggatgtcccacaggctcttcaaaaccagcatatccaaaataaacacatcatcttcctcccaagctcttccttctcttttaacagcaccactgtagcatcctataagctaaaaaccttgaattctcctttagctcttccttttccctcatctaccttatacaaccgcctatttggtgtctctgtttgcatgtcccaacagcttggccattacttcattcattcaccagatatttattgagccctactttgtgcctggcactttgctaggtgttccgtacacaaccgtagacaaaactcacagcagttcagttttattccaagagagtgatgagtatcatgatggggtcagttattgggtgatatggaaactcacataagaggtctattacctacacaggagcagggagaggagttggggaagacttcctgaaaaaaaaaaatagcacctgacctgtgatctgcattatatagcaaaaagcagaagggaaaagcctgggctttctgaagaattgaaatataataagtttcttgggggtagagcttaggcagggaggtgggcagtagaaaaaaataaaacctaggtctaagttagtacagggtcttgtaaatcatgtgaaggagtttaaaatcttccctaagggctgagccattcaatggttttaagcaggcaagagaaatggtcagattttcatttgagaaacattcccttggctacgtagtggagtgaggggtggaagtggagcaaggctgtaggcaggaagctagtgaagaggctgatgcagtgcccaaagtacaggggatggcaaattgaaggatgatcattgagtggggataatgaaaaaggatagagatttgagacataaataagggagggctgatcaagtttctgattaggacatctgtgtggttgatcggcacattcatttaggcagagaagtgttttgtatatttgctgtggagggtcgggggtatgttaggaattcaatttggggcatatggcatttgaggtgcagttatattgagtacacatcaggacacagacagaattttttcattcatttgataaatatttgttcagcccctactatgtgccaatcactgctctgagagctggggatacatcagggaacaaacagacaaagatccatgtccccatggagtttccatttgaatgggaggagatagacaatgaaccaaaaacacaataaataagtaaattagatactaatttagaaggaaataagtacatggggaaaaaagtaaattagagtaaagaggattggaagttctgggtatatgggggcactcaggggagagattcaggtagagattgaaagtcacaaacaactgggtgtaactgggaccaggaggaggcatccgcagagagggagaagctaaagagagtgaagaaagaacaattttaagagcatgtggtccctgaagaggcaggaggggatgagatccaaatagagggattggccttctagaggaagatggtcactttttacatcataacgaggaagtcatgttgtaggactttctccttagttcagctaaaagccaggttcttgtcacatggccataaaagattaggctcacagacactttgaagggtgataaaaatagaatttattgggtgaaagaggaaaagagggaaacagggactctcagcaaagcgagagtcctcctagtccacttcccgcctcacagattgaatcccaggtaccaccccacaacaggagaggccaggctcctccccactataaatgaacttcccgaagctccaccccagtacacacttctcccagggcacaggcagttgaaggttctgctagggagcccttttttacttagctgtctcagttgtaggaaaagatgggacagatgcaggtaaactaataggcttattggtggggaattcaaggcattctcgtgttaaagtttcaaacatttctatgacttatcaaattattaaaggacatctaagaagatggaagatggaggtggcagagttagaaatttgatgagaagatttgaaataaaagtggtgagcaataagaagagggttggttgactgagatataggagacacccaggcagatctgaaggctccactgaggcttcccccagggagactgctggattctccagtctgggttaagtgataggggtccctgaaccctatcaagcatttaacaccttgtgttaatcccatttaccttgtacattaatctgtatctgtgagtactgtgagttccttgaaggtagggaacaggcctgttttgtcattgtccagaaggatgtctgtcatacaatgaatgttcaatacatatttgtggaataaaagcacatacacatacatgaataatgattaaagatttgatatatcttggggagaagaaagagatcagtaggatgatgctaggtttgtctgagatggttcaaattcccacttggtattctggcataattgttaatggcaccttgctttaactcacaaaactatcccagtttgaatgataagtcatatggtgactgtaatgattatacgatgtttaaatgcaaagaagaagtaggatctgatttttcctagttgtaaaaatggggtaagtaagcagggaatcacaatttttatccccctgaataaacaattcctgccagttgtcttcacaaccaagctatcacagccctacaaaaaggtgtcattaggttggagaaactgnnnnnnnnnnnnnnnnnnnnnnnnnnnnnnnnnnnnnnnnnnnnnnnnnnnnnnnnnnnnnnnnnnnnnnnnnnnnnnnnnnnnnnnnnnnnnnnnnnnnnnnnnnnnnnnnnnnnnnnnnnnnnnnnnnnnnnnnnnnnnnnnnnnnnnnnnnnnnnnnnnnnnnnnnnnnnnnnnnnnnnnnnnnnnnnnnnnnnnnnnnnnnnnnnnnnnnnnnnnnnnnnnnnnnnnnnnnnnnnnnnnnnnnnnnnnnnnnnnnnnnnnnnnnnnnnnnnnnnnnnnnnnnnnnnnnnnnnnnnnnnnggattataaacattcctgccagttgtcttcacaaccaagctatcacagccctacaaaaaggtgtcattaggttggagaaactggaacttccatttgataatatgggctgagtgactatccttctggaaccttgagaaagactcatacttcttaactgagaaattcagtagaagatttggagcaatggaaaagatgcttagggaaacaagttggcagccttgaaaaatgaatcttgctctgctagcttgctcagcttcatccatggtaaatccccacagtctctacatggtaaattaattcctttcaatctgttccattgtttcctttatgttagaaatatatttgtatcaaaacaatttatataacgttattatctgcaagaggcaaagggttaagagactgggtaaatcaaaggataattatttggagaatgggtaattcaaaatagaaagcacagagccattataatactcataataaccaagataaaaacacagaatggaacaatcagcactcctcttgtaaacattgcatcgatgaggatactttactggcagattcaattcaaactattggtcagtggttctcaacattgcctacacattagaattggctaagaagcttttgaaaaataaaagtacttgactcatccctcataaactctgatttaattatcctagaccgggtcttggacatctgtgtactttaaagcccttcaggtagtttaattgcatgtccagggttgagaatctctgctatggctatggctggaaaccatctgtcaattgttcattttcccaaatgtcatagaaatacctcacaatagaaagtggtcattgaatttggctgcattagtcattctcattacaagatggaatttgaggaaactatttgaaatattccttatatgttcttgacaagttgtatttaggaatttctctgttttcctttttcagtacttgaagcttttatttgaattactttttgcttacaaagtttaagacggagcttgaattttcagcttcatttaaaatcatgaagagaagtcttaagggagtatgtcgtcaacctgtggaatgttccactagagaattgcggttttctcttcatctttgaaactacatgtctaattccatgttattagacattccattaaaaatgcttcttattgactctagtgttcttttctgatgctcatgtttttttgctattttgaggaactcttctattcattcagttgtttaataagagtcgacaacatgccaagcactctgaaaggcactcaagattcagtggccaaaaacaggcacagttctgcatttcagagaacttacagtctagtgagacaacagaaatatcacccaaagaactggaaatttgcactctgataattagtgaaaggagtttatagttatatatatatatatatagtgatatatcactatatataatccctatatatacaccatatatacatatgtatggcaggttcaattcaaactataggtcagttgttctcaacattgcctacacattagaatcagctaagaagcttttgaaaaataaaagtatttgactcatccttcataaactctgatttaattatcctagaccaggccttggacatctgtgtattttaaaggaaatagaagagttcctttaaaatggaagagttcctcaaaatagcaaaaaaaaaaaaaaaaaaaaaaaaaaaaaaaaaaaaaaaggcaagcatcagaaaagaacactagagtgaataagaagcatttttaatggaatgtctagtaacacggaattagacacgtagtttcaaagaagatgaagagaaaacctcaattctctagtggaacattccacagggtgacactatatatatatatatatatcgctaaatatgcatatgggaaattttaatcagggagtttggggaaactttctgaaggaagtgacagttaaatgataatttcagataaataggagttaatacacaggaggaattcaggtatcacaagatctgaaaaaaaaaagtagtaagtaatttcaacataatttggcagaatccatgagggttgtacatgttgcatgatctgggaagcgcataacaaaaagttatgtcaaaaatagtatgtttgaagtttacaaccttactaactttctactttgtcttatatttttctgatattcagctacgtatctatagatgtgactctgcagcagctggaatcacactccttctacaatttgagtaaagtgactcacatgtaagtacaaggaaaagtgcagcatagacctaagccacaaccactcttgactgataatcttggggctccagatggcaatgggagctggtttctagattgtgagtcaaaacttctgtttatgattaaattattaacctgctctcattctcagtttatgttaattcatcttcattacacctcaattccatggttggaagttaaagacaacattaaaagttctgttcttgaaccactatctgttctattactactgtgtcagcatattttattgatgtgaatatcagtgagacaataagtatttactgagtaactacttgattctatggtctgtgcaagattctacaaagctggcatattttccttaattcggaaagagaagagttgcttagtgagattagaatagtagggaatttaataaccctagttctggagttggtcagagttggattcgaacaccggcatctttgcctactcattatctacccttggacaagtcacataatctttcctagtctcatttgcaaaataagtgtaataagagctgcaacttcatgtttatcataaatatggaattatataatatctagtacctgaaaaccagtcaatataccagtcaaaaatagaataatttttctatttctctagtagattacaatctataaaaagtgttacataaataatcacattgcattattttaagtagctatgtattactaatcatgaactctattttcttgatgaagaaacaaaaatacttatctacaaatacttagtatatcctaacgttacattaaacattgtatgaacattatttgtttggttattatttacctcttaaaacaaccctgtgaagtaaatacaattatttccattatttatataagaaaaacataaatgcagagagactaaatatgttttccttggtcgcacagttactaacggacagggccacaatctttataccataaatgtatgacttaaaaattcttccctatccactacattaagatgctttcaagaatactgaggtccaagatattgcttacaagtatggtaggctaccttacatcagatcaactattggtctgagaataacttaaggagctgaattttttaaaaaatgtttgaaagtatcagagtgttatgaagacagtaagaactaagtgggcaataagcaaatcccaaaaacatcatttggttattttccccttgaggtatttcctgaattgtaagcaaaagcttaagggctaagaaactgaccagaggtttaggcatctattagggctaggaaaataaaaatctgagttcagggcttgctaagaaggattgttcctagtaaacaatccaggattttggttgagatcactaaagagcttcatcctagaagtatgggaaaactgtgaatagatcagcccttgcaaagactaaagcctagctttgaatcattaaaaaataactcaagtttgtggggcaaaaaaatcaagagaagaaaatagacaatagaaaatgatccataggaagttcaaatattggttatcggacacagactttaaaataactagcatgttcaaaaatttaaatggcaagagaaaatttcagaataaaactgaaaatgataagaaggatcagttgtaaactctagaatctaaaaagtcaataaaaaatctaaatacatgagtttcacaagagattagacatagctcaaaggagaattagtaatctggaagataggtcagaagactgtaatcagtctgaagcatggagagaaagagaaaataagaaatatatagcacaataaaaaatctagcatacctatgactagatcccaagaaaagagagaaagaatgagaaaagcaatatttgaaagaaactttccaaaactcttaagagacatcaagtcacgtatgttagaagtactgcaaaccccaaaaggataaatacaaagaaagctacatcgaggcacatcatagtaaaattgccaaaaaccaaagacgaaaagaaaattataaaagccagcaagtctgggcgtggtggctcatgcctgtaatcccagcattttaggaggccaagacaggcggatcacgaggttaggagattgagaccatccaggccaacatggtgaaacctcatctctactaaaaatacaaaaatttgccgggcatggtggtgtgtccctgtaatcccagctactcgggaggctgaggcagggaatcgcttgaacctgggaggcagaggttgcagtgagctgagatcatgccactacactccagcctgggcaacagagtaagattccatctcaaaaaaaaaaaaaaaaaaaaagcagcaagaaaataataaataatactttcaaggatgtaacaagacagctgacttttcaacagaaatcatggaacttataaaacaatagaaagatatttgtgaacagcaaaacagcaaatatctgccaacccaaccaaaagattatttaaaattagaaaaagatagatacttcaagcaaacaaaaattgagagaatttattaccattaggctcatattaaaggaactattaatgggaattactaagacaaaaggaaagccattccacatgctaagacatttctgtgcaggaagaaatgaaaagcaacaggaaaggtcaatatatgggtaaatataaatgaaccttgactgcacaaaatgaaataatgtcttaggggatttaaaatactgttctttgctctgcatgatagtgtgggatcataaaattgtgcagactgaaactgtattaagcagtcttaataatcaataagaaaaattgtgttgtgacttctaaaagcttttatgaaaacattaaaatttctcagtcagttataaatggaaaggaaaaaataataaaactaatatttcacatactgtaattgtcaacattagaaatacttagaagtaaaatgctttattgctttgtaaaagcttagcaagagtagcttagacagtgcttgaccttttatctttattatataagctacaagagaatatcttttcaataccctggcaaattgtcatacttctttctaagtctagattagcttccatcattttatcctttgctttttaaatattataaaatattttcaagtgtttctttaatgtaaaatttttttaccatcattgtttcttttgggacatcttcatcctttgcatccatttttctcccatcactaagttcctctgattaatatctagagtttctcagccagcctggacaacatagtgagatcttgtctctaccaaaaaaaaaaaattagctgagcatggtagtgcaaaccagtggtcccagctacatgggaggctgaggtgagaggattaattaagcctaggcattccaggctgcagtgagctatgatcacaccactgcactccagcttggatgacagagaaagagctggtctctaaaataaataaataaataaataaatagtctcagatggtggtggtatcaacattttcatgccagtaatttattctataactccatttacattttgtttgaatttccctttcagtaacattacatttcatttcttggcttcattttcatctttattggtaaattcactctttcaattagccatttttaggaaatgtcctatgaggtgattactgggaaacacataggaaacacaatgacatgctttattgtttgtgaatgaactgagcaagagatgcccagtgaacaaccatcaatgactttgaaaggagtgatgtagttggtcacctattataatgtgcatctgttatttacatagtgatttgtggactgaagagctagcaacaaagtttgtactttattcaatgattaatagttaatatactatggtaactgaaacttgagggatgtgttgaggacagttattatttacatttgattaaatcatggtaactgaacttcatgtgtattggagccatgcaaagtagaactgcttgtatgcatagaattaaaatatgcagtagctttttaaaaaaagtataggacattataaataatgttaaagtgttctaaagatctttgaattatctgagaagtggtaaaagtactaactgaaattaaactttaataaatcataaataaatgttttaactcacagggcagctactgaaatgcttgtagaagactggaaaactaacaggctaatagtagtggggaatggaatgaaattaattaattaatacaaaaaagagagaaattggaagaaatagagagtttctggaataaatagtagatttaactccaaataatcagcatttacattaactgcattaaatgtaaaaggactaaatactctaagtaaaatacaaacattgattggtgaatttttaatactcgctgtatgctgcttacaagagacattttaaacattatacagaaaggttgaaagtgaaaagataaaaatatataaaatgcacacagtaactaaaagaaaacgatgtaaatatacatacatataaagcataaagtcttactctaagggacacttcataaagattaaaggaattactatataagatatagtgattctaaacttaatgtctataagagcatagcttcaaaccatataaagcagaaattggtagaactaaaaagataaacaataattggcaatcatagtgagagcttattttaatatagttttatcaataattgatagaacaagcataccaaaatagtaaatatactgataaaaagttaataaaaagatttgaacataatttacaaacttgatcatattgacttataaaaaatattgtatccaacaactgcagagtatatattcttttcaaagacacatggaacatttactaaaattgaccacatgtggggccataaaagcaagtctcaatagattaccaaaaaaattaaaatcaccatgttctctaactagtaaataacctaacttctaaataactccgatttctaattaaccataggattaaggaagaaatcataataaacattagaaaataattttaactaaatgataataaaaatatgacatatcaaaacctgtgggatgtagtcaaagtcatacttagaagaaaacatatagccttaagacaacatatattagaaaagaaggctaaaaataaatcatttatgtatccttcataagaagtttatataatagagcagtacattaaaaccaaagaaagtaaaataacactgaggcccaggaaggctgaggatccagtacagtaaagacaacaacagtcttcaaaattgaaaaccaaatcttctgactccaaatctgatatccatttatcaaaccattttgcttctttgccccttcaccaaaaacaaaagcaattaatttgtagtgaagtcctatataaaccctattgatctgaaaagcagtcattttgtttgtattatgatctttttcctcacaaagattccagttgttatttataagtttttttaagtaaatattcagttctctactctgagaaaaagtgttaacttcctaaaccgaaggaaactattaaatacagtaattaaaaagagaatgagtttaaaaataaattattaaaagacaatttgcttatatacttgagatattgagagtctaatatcttaaagatttaaaggataatgcaccttgtattcttcaaatgtttctaatatgtatctgacattattgtctgcaaatgattttggtcagcagaaaagattagtgaagatttttgcatgcatgccacccaaatgtttaatacatttgttttataatcattttttaagcagtgactatatacaaagcattataacttgcatgagaaaaatagagctgaaagatcactcatctttgctcaaggaattgagaatcgttttgtgggtataaggcatgaaactgagtatcgatatagaatgatttgtttaatttatataccatataagtaccatcaaccaaacgttcctgggattcctcagtatagaattaaagccctctgatttgtttaggaaagagagctctttattgtgttggatttgctgcaaggatagatatgtagatactaaacttatgaatacacatttcaaatgccaatgcatattgccagcatttattgaaaagctccaatgaggactacagcagtaaaataacataatgttattccatttcataagtgtgttttctttctaagctgcccttcaaaactgactttttttggtcctgtgatttggtaaatagaaagatgagcagttagtttaccattgccacttctaattatccctgccggtacctgtccagtcttacagagctctatatgagctctgagatggcttcccaattcatgtttagattttgttctgtgatatgaattagagtattagaacataagcactctttagcctaaagctgcctccttgtaaatttggcctaaaggcctctctgtatgcagtgaactataacctaactggatatgtgaacagaccacagaccataatttacctttttaccaatcaccgagtttcagccagtcacaggcgaccaattgttcaaacagtgttcaaataaggcaaatgctaagctataaccaatcttgctgcttctatacctcacttctgttttctgtatattaccttcttttcatccctcccagctccagaaattctctatcacacagcagcaccaaagtctctctgaacctattctggttagggggctgcccaattaatgaattattctttgctcaattaaactgttaaatttatgtaacattttcatcttaacagtactgacattgggtctgtgacctagaattgtcattcccaaaacaaaaagctattcattcaataaatacagtatgtttaacacagttaaacctgtgaccattgcatctttttttttcttttattattatactttaagttttagggtacaagtgcacattgtgcaggttagttacatatgtatacatgtgccatgctggtgtgctgcacccactaactcgtcatctagcgttaggtatatctcccaatgctatccctcccccctccccccaccccacaatgtggagaaataggaacacttttacactgttggtgggactgtaaactagttcaaccattgtggaagtcagtgtgtcgattcctcagggatctagaactagaaataccatttgacccagccatcccattactgggtatatacccaaaggactataaatcatgctgctataaagacacatgcacacgtatgtttattgcgacattattcacaatagcaaagacttggaaccaacccaaatgtccaacaatgatagactggactaagaaaatgtggcacatatacaccatggaatactttgcagccataaaaaatgatgagttcatgtcctttgtagggacatggatgaaattggaaatcatcattcttagtaaactatcgcaagaacaaaaaaccaaacaccacatattctcactcataggtgggaattgaacaaggagatcacatggacacaggaaggggaacatcacactctgaggaccattgcatcttaaaaggctatatgcaagattcaaaatagtagatcattctgttcttattcatacctcttcccttgacctctgtgatattacaatcctggttggactcctatcatgctggtcagtctttcctatcatcttttgctggctgcttccccttcctcagctataattactgggctttcttatggcccaatcctgtgtagtcttctcttttcactctaccttctcctgctatgtgatcttatctaacaattcccaaatttatatatctagttcaggccctcattcttagtgttggtatatacctattggtctacttgacctctcttcccagacatcttacacatatctcacattttatatccaaaactgaaatcaattgtcctcctgaaatctactactcctgtgtatgttgagccaataaatgccaacttccttcgtcctgatgcaaatcccaaatacctgagaggtatcactataccttctttcctcatcacccacttctactccttcaccatgtcctgttgattctactaccctaatatatagaaaatgtatcctcttcctctccactgccaccacccttatttaagccaccatcatctcttgtttgaactatgataattttatatcttaactggtatttccaattgatttcctctaattcagtatcttcacagcagccagaatgatttttcttgaataaaatccaagtatcttaacataaacagccaggcccacaagttcagctggttcctgcccacctctgcgttctcatcatgcttcactcctgcacacctgtgttctttggttttttgaacagtccaagatctttctcacctcagggtattcacatgcttttgcctctgcctagaaatttatttctctctctctctttgcctagttaactctactgattattttttcagcctaattgtgacctacacagagacacatacccttcagcccacttctgcatctaagttagatccccatttgaatctatccttgaatgctttttggtttagaacttactaaaatttagtatgacaatgcagatgtatgataataataggtctctgtaaggcaggatgctttgtgtgccattcacctacaccaagctgtgaggaaatcaaactaaaacaaaaaatgaaacaatgtattctgaacatgcattttaaaaataatggattggaagagtaggctagtctgaattcatgaaaaatctgattgacagaatgtttagtgtatgtgtgtacacacacatattcatacatatatgtttagccaaccttaattgagcatttaccatatcccaagcactacactaattgctcaacatacatatactcatttaatcctcacgacaattctctaaagtagttactatcattttacagccaaaacaactgagattcaataactacatctttatatttaaaatgcatttcatgtaaacatcacagaattggatcttgcttttatatccagcttgaaaatctcagccttttaattggagtgtttaatccatgacattcattgtgattattgatatggttggatttcggtctactattttcctatttgccttgtcttctctgttctttgttccttatttctcctttgtcttcttttggattaatctagttgtttttgcttttgtttattagtattctattccattggctttttagtcctttgcaaatgttttgtgattactcaagaaattacgatatgcatccttaacttatcacagtctacttagaaataatattatattactccacatatcatgtaagaaccttttgaaattaaaattccatttaccttcttccatctttcatgctattgttgtcatatattttattcctatatatgttataaacctcataatacattattatgttaactttaaagattcaattaacttttacataatttgagtaaagaaaaaaatagtcatttatatacattcaacatatttaatatttccagtgtccatgcccttctgtaggtccaattatttccctttagcccaaaaaacttttagtatttcactgtggttctactggcagcaaattttctgaggttttatttactgaaaatatattttgccttaatatttgaaaaacacttttgctgagtatagaattgtaccaaagccatttttgtttcagccttttgaaaatatccttcaatgtcttctggccttctttttttctgatgagtagtcatatccgtgttattattctcctgtaggtaatgtgttttttcccctctggttacttgtaaaactttttctatatctttgcttttcaactgttaaatcataatatgcctaggtgagtttttttatatttaatctgcttaaggtttgctgaactgcgtggatttatggattgctggttttgttaaatttggacatttttgtctactatttcaatagagtatgttagaagtgatacaatgccagttctagtcccagtctttaaaagaactggcagcttttactttatatccttggaaccctgaacaaccgtgtaagacgtccaactgcccagatggagagaccgtgtgggaagatcctgagatcctgggatagagaagagcctagctgagcctaaccttctagcaattcccatcaaaaagccaggcatgtaagcacgcccttttggaccctccaaattgttccagacaccagctgaataacacccagtgatcctggtggaggctacatagagcagaagaatcacccagctcagcactgtctggcatcctgatccacaaaattgtgagctataataaaatgttattttaaccacttaatctggggtaatttgttatgcaacaataggtagccagaggaagtagcaattatatgtcagttaacaatgggtaaaggcattgaggatttgtaagaaaaaaatacaagaatggtaggttctctgtgagttattcaggatcctaagtggatacaaatcatttcccctgggtagtaacttcagcgaggatactgtttggaccaaaaagtatgcatgtaataaagatttatatctgcaaaatgatgaaacactgaacacttccattttctattgtactttctctgtaagaaagtcaataacatacagattgctgctgttgttactcctaataataatagtgaccaagttctgaatgccttttgtgggccagcactccactaaaagtacttcacatacactgtctcactagtttttaccaaacgttagtttctgcgatgtcaaatgaagatggtaatacataccttgcagagctcttgccaaagatttcttagctaagacatttcaaagtgagaatttgaacccaaaagtgtctgcctccaaaaccactgcaatgccataaaatctctttaattaaaatatctgcaataattaaagaaaatgctggccaggcgtggtggcccacacctataatcccagcattttgggagactgaggcagaaggatggcttgagcctaggagtttgagaccagcctgggcggcaaagtgagacatcatctctatgaaaaatattttttaaaattagctgggcacaatggcacttgcctatagtcccagctgctcaggaagttgaggcaggagaatcacttgagcctataaggtcgaggctgtagtgagccatgatcgcgctacacactccagcctgggcaacagaatgagacccctatctcaaaagaaaaaaaaaaaaaaagcaaagaaaaagaaatgctgcnnnnnnnnnnnnnnnnnnnnnnnnnnnnnnnnnnnnnnnnnnnnnnnnnnnnnnnnnnnnnnnnnnnnnnnnnnnnnnnnnnnnnnnnnnnnnnnnnnnnnnnnnnnnnnnnnnnnnnnnnnnnnnnnnnnnnnnnnnnnnnnnnnnnnnnnnnnnnnnnnnnnnnnnnnnnnnnnnnnnnnnnnnnnnnnnnnnnnnnnnnnnnnnnnnnnnnnnnnnnnnnnnnnnnnnnnnnnnnnnnnnnnnnnnnnnnnnnnnnnnnnnnnnnnnnnnnnnnnnnnnnnnnnnnnnnnnnnnnnnnnnnnnnnnnnnnnnnnnnnnnnnnnnnnnnnnnnnnnnnnnnnnnnnnnnnnnnnnnnnnnnnnnnnnnnnnnnnnnnnnnnnnnnnnnnnnnnnnnnnnnnnnnnnnnnnnnnnnnnnnnnnnnnnnnnnnnnnnnnnnnnnnnnnnnnnnnnnnnnnnnnnnnnnnnnnnnnnnnnnnnnnnnnnnnnnnnnnnnnnnnnnnnnnnnnnnnnnnnnnnnnnnnnnnnnnnnnnnnnnnnnnnnnnnnnnnnnnnnnnnnnnnnnnnnnnnnnnnnnnnnnnnnnnnnnnnnnnnnnnnnnnnnnnnnnnnnnnnnnnnnnntctcctgacctcgtgatcctcctgcctcagcctcccaaagtcctgggattacaggtgtgagccaccgcaactggcctatgtgagttttttaaatcaaaaataagtgaaaaattttacaactgggataggtgaaatgtgtgacttatgccttatagtataataagactatattttgctgatccactaagttgaatcaagtggatgcatcagaggtttcaaaatcaccagctttagcaccaatccttaaataatcatgaaagtagctgtatgcacctgccaggcaatttagagaatcacttctataatgttctatttttagtggaaaatctgctgataaatttaaattttcttcaatgtgctttaaaaatctgaatacttataaactctcctcaatatctcttatttttaatttctcaatacattaaaagatacatcaaatcatgaatattgccttttggttatagattatttctttcctccagttacatatggaatgttaataataattcattaataattatcaaagaattaagacttctctcattgaaaatcctcgataatgtaggaaataatttattctgtgaactttcatattatagattaatatgaaaagtaagtgctagtctaacaatcaaggctttagaaactaaggtctaatctataccaagagctttgacagacttttaacttttgacccagtaattccacttctataaattttccctaagaaaatagagtagtgaaaaaaagttaatgtaaaaagccatttgttttggagttaattatttatattagagagaatttgggaaggacttaaatgcttagctaagagaatggtcaaatatgaaatactaagccaggcgcagaggcacgaacctttagtcccagctacttggagactgaggtgggaggattggttgaggtcagggatttgaggctgtagtgcactatgaccctgcctgtgaatagccactgcactccagcctgggcagcatagcatgaccctgacttataaagagaaaatctgttgctatagacaacttaatcacataagaaacgcttttgtcattatgttatttaaaatatatatgtatgtatgtatgtatgtatatatatatatatatacacttaacagaacaaaatagtttttctctgtattatcaaatgatgggagttttttttttacatttatcagcttattataaaggatattacaaaagatagagatgaagattgcatacagtgaagtatgggggaggggcgcagagcttccgccccctcccttggcacaccaccctccaggaggatggtcagctgtcagaaagttcatttcctttttgtatgaatgtgtttcaaagttttttacaataaatatgtattagctctatagtcagatgaaattcactttttaaagatcactgtgcattaaacttgaaattaatacttgatgtcaagatacatcagtaatgtattatgtgatagaaccctgtcctaaaatgttaccttaaaattaatttacctatttattagtctcaggtttcacctagggattgtatagcacttaaaaaatttatagtaacaaaatgatggcttgggcaatatatacacatcttatttttaaaataaatagtaactatttccttataccacccagagtatgcagcaaagtgcacctaatagatgtccagtaattattcacttatattctaattaatctcttcccactctaaccacttgagtgagcaaacctagtcaaaatcaaggtgactgccttccatttttttgaactataggtgaggtgggaaattaaagaaaaataaaattaaaaagaaagagaaataagctttcctatattaagctgacttgtcccagaggcagcaacaggcacagcccagacccaggaaaagtcttgataatactatttaatgtgctctggagactctcccagcactccctcaacatagggagaagaaaaacaaattttcctttgttttatggaataagtttatagatacttgttctctgtcactagtgacttcaagtattctgttttatctaagaagtacaaagaaagtcataagaagcctgagtaggcctgaactacagctgcctgggcaccatagtgaaggttatgagataaaccagtgcaaggctctttagagcaaaacctagataatgaacatctaggttgcttggcaacggtcatgtgcaatcctgagttggtcctgcctctgtatccctgctttcacaccactgtaagcttgcttcaagctagcccacccccttttgtgaaatgtgtataaaagtcaagtgctgtctttgttctaggcccagtctttggacattgagtctgctaagtccgagtgcactcaataataaagatatcgtcctgtatacaccccaaggtctctttctggttctcctgatcccacaacacaggcacttaaaagtaaacgggaaaaaaattgaaaatcaaattgaaacaagagttaaaaagaagctggggactggtggagagctaggcttttggctaatattcttgttcaatttattgttttgggtaacaataaattggctgtggcagcttctcttctgacatcatctaactgagtcttcttggtttatgctggtctgaagtgttctcatccccatctaattttgcagatgaaatgcaaagtcggctttttgattgccctcaaattgtttcctggcttggcatgcttctcactcattaactgggcagtttagggtgtgggggtgaggagcacagtcaaatgccacgatccaatgcccattgaataattgaggtaggaagggggacactaggaaaatggaaggaaattagtggttggaaaaaaaaaaagtcttccttaacagaagactttaagtcttttccccttcttctgttcttcattccctcgcctgagaactcccttctctcatcctgctgatttcccatatactctttgaggtgtggactcagggactgagtgcctgctgcaatgctagtcgtaacgggaaagccagttgtcctgtgctaggcttttattgagaattaataaatgtttcttagaggaagaaaaaaaacccagaatgtagacatgtgattaagtgaacctaactgcatgctgaattattgatctgttgatttgtgaaaactgccattggacagcaatgttacacttttcatctaaatgtttatttcatttgaaatctaatgaaggagaattagacaatgaatatttacatatatttttagttctgccggatgatctccttgaaacctcgtttaaaaaaaaaaaaaaggctgtattcgaagtcataagtcctagataaaggcccagtgttgcctctaagtgtataacaggagattattcacttgccctttcaaaacatgtctccatagttttgtctgcaaaatcaggatgatccttacctgcatcacacgagtcagttatgttgttccctcactaggaggaaattcacaccctccctcaggtgaaaaaaaagtacactgtttctttttaccctttaatcttctgtattaatttgtattcatgcttctatgaagaaatacctgagactgggtaatttataaaggaaagaggtttcattgactcacggttctgcatggctggggaggccttaggaaacttacaataatgacagaagcggaagcaaacaggttctttctcacatggcagcaggaaagagacatgcagagcaaagtggggtagatccccttataaaaccagcagatctcatgagaactcactcactatcacgagaacagcatgggggaagcaccctgtgatctaatcacctcccacgaggtccctcccccaacacgtggggattacaattcaagatgagatttaggtccctctcccaacacatggggattacaactggggttacaattcaagatgagatttgggtggggacacaaagccagaccatatcatcttccaaagctgaatttttctaatcaatacgctttaagagccttgcatatttccccagcaaagaaaaagagcctcgctccataaaacagcatacttaagcagcatatctggcacatattttaatgttattttttatagagaatatataaagctttacttttttgtttttaaagtttgagattttttgcatcctctttattacttttttttgattgagataaaataaaaagtgaaaattccacattccttctttttaaacctatctgctagacgtgcccactatgaacagagtactctatatttttggaattttatttatgcttattagtttgggtaggtgaattactataagaaatagacaaaaatacagacatgttacagcccttagtgagtgaggtttactgcttgctcatgggagagtactggatggatgagtgggagcgcagagcagccaccttcaggcagtcactcagggcctcaggttgctggaggcacagccatcttcagctctggagggcatctccattcctagtgtgctgtattacaaacagcttttctttcttccaatgtctccagctttctggcagcatagctagcctcctgcacactcaggccataattgcttaactcaaaatggtgtgattcaaattcaccctcacaggcatgcttgaagacattcaaatttgaacgcctctttcacccttctctgattagatgttcttttgtactcacttctgcccttcctttcttcctatctttgaaaaggttttactagttgcatttgcttcttatgttacctctctatttaatgattgattgattgattgagacagagtcttgctttttcgcccaggatggagtgcagtggcacaatctcagctcactgcaacctctgcctcctgcgttcaagcgattctcgtgtcttggcctcccaaatagctggaattacagacataagccaccacgtccggctaatttttgcatttttagtagaaacagggtttcaccacgttgcccaggctggtctttaactcctgacctcaactgatccacctgcctcggcctcccacctgcctcagcctcccacctgcctcggcctcccaaagtgcttacaggcatgcgccaccacacccagctgttatctctcaccatttagctaaactactggcagtctacgaccactccaccccttctctgcttcaggagatacttttcaaaagtcacttgtgagcaagtggtaagctgttgccttacctcagaaagcagcttcttttccctgctgttttcttgtggggtctctcattcatctttctcctttgtagctcttacatttccttccagaaatcttctcctctttcatgtttccttctctttccttgctgcctctcccgcatttctcctcttccagcctccatgtaagttgccagcctcatttaatcaactgttactagcagctgcatttcatttcccttttattctctaccttttcagctgaccaggtgggctgcattttcttttactctgacgttctcttagaccactcactcaggactactcgttcaacgacagtctcttgtggagcaattttccagattacaaaccctgctcaatttccaaactcctgcatctagtttacatctgtttgtctctggcagaagttcaaaccctcctcccccagtggaaagctctggcaaggagtttattgctcaccctggaaagagagaaccacctcaacagagattgatagtctctagaggggcaaggtgggaaaattatgagattttggagtagggtggccaactgtcacactttgcccaagacagagggaattccaaggatatgggctttgcattttaaagccaggacaaaaaatgaaagattgtataaagaggatctttccatgcagggtcttgtttaggtaaaaatcatgacataatagtttaggattagcatagtgaggatttggaagtgaggagttctaagatcttggggtataaactgttgatgctttctgttgaagcattgatggttctttgtttcaaaaactctctgtaatgaacaataaagcaatttgcctgggcaagagcctcctggaattgtagttatgttaacgaggacaatggaccagtaagggtatattattatagacagtaagctgtgtgtttagggaggagagagttaggtgatttctgttctcagagttaactccatcctctcttttccaaggtctgtttcatattcagtgtccttagttgaaatacctagttgaaaaaaccagacagttttttctaattttgcaagaatgtcacaacatctccagtcccaagtccctgatgtctcttctagctttcattgcacttatgaaaataacaataataaaagcattatttatagagccctaactatgtggaggccaaacataaaacccctcatgaatattatttaatcctcacaaaagccccacaaaagaggtgttgttaattgttcctattttacagacaggaaaactatggctcaaagaggccaagaaacttgtccaaggtcatataatcagaagtggcagagccaagactctatcttgagtccatctgggctattcagaaataaaaaggagtgaactactaattcatgttacaacatggatgaacctcacagacattatgctaaatgaaagaaggcagacacaaaagactgcctgttatatgattccatttatatgaaatgtccagataaggcaaatttataaagatagaaaattgatcagtggtttctaggcataaaggagcaagtggaaactaactgcagatgggcctatggttactttcatcattgaaagaaatgttctaacctgtgatgatggtttcaaaattatgtaatgttactaaaaatcattgaactgtatgcgtacatacaatgtttgaagtttatggaatgtaaattctttttcaataaaactttaaaaattacagaggtcacattctaagctttctgactggtaccaccaccgactagatgctggttattttaggtgccactcctaaggagaaatgctaaaggtttactgggttcttatatacttttcaggtaagcatagggaatgccttaaactcttttagccaatcaacctatgttgaatatgtttaatttaaccagtgagagttcatttctagcagttacttatttctctaatgctaactgtgcattcttgatcagcatttatataaacctaagtatgtaagttactgacacacgatattgcactatacatgcagaagtgtcttcgattgctgacatgacaaaataaacccaagtgaactgtgaagacttaccacttctgtacatctggtatggcaatgacagagccttactgtccatcttgctgtgctgtcgttcatcataaaattccctcatcctcccactccaacactcattgtcttggccagaatacttataaataataaagatatttgtcttcaactcctcaccgaatcattggagggatttttcttttttctctaaatctaaaagaaaaaaaattctgatactacaattaagaacaatgtagcccataaattaaaatggacggaaaccaagccaacaacacaaaagagctgagcagccattgggtccctatgaggagacaggagtagtttgtcgttgatgggacccctggcagctacagtccctggggtaccctgtggcgtaaatacatatttttctcatgaacgtttgttaaaactgatttatgttgttttgtctttgataagaacagatatggatgtattatagtgactgtgttccttgtaacttatacagagaaattcggaataccaggaacttaacttacatagaccctgatgccctcaaagagctccccctcctaaagttcctgtaagtattaaatcctctcccatcctacttttctggggggagggggtcagatttaatgctgttgtctcccaggaatctccctagatgatgtggtccaggttcattttaatggtgtatagcctgggtcgggggcaaggtatcgggtgaaatgatccacatttttaaaacctattcaaaagtcagcacatagtgctggaaccagagaactgctccaagaaacaggagggagaaaatgctatcatgtatatgtggtccttaaatgtagtatttcagaacaaaacaaaacaaaattctgagagccagttggtcaattttgtttgaaaatgggtatcacaacaatattattagagtggctgttacacaggaaaaaaacccacaaagagtaaaatacacttctgtggggagtggagggaaaacagaagggacaacagtttcaacctcccactccagcactcaaatgtccagcactcactgctttgctttgaaaacaccttatgagctaaccataagctccatgaatccagggaccacaacattttttttctctgttgaatctttactgcctagtacagagtaggcgctcagtacaaatgtgttcagtggatgtgtctgtatgacctcaggccccctggataccaggtagaagagtcctttttcctacttgcatgcattataaagattagaaaacaaagagtatgaagaagaaaattgttaaaaaaaacttaatcccaaaccccaaaataagcactattaacatttcagttcatcttcatccagaccttcaaaacaaacttatgtaatcatagatattttatgagataagcccttaaggatgaatagagggtatcttgaacaagaatggggagatagaaaagaaatttagctggatggaatagcatgataaagacacaaacgtagggaaccacgcagcttctttggggaactaaaaatagttgcttttttttttttttgagatggagtcttgctctattgcccaggctggagtgcagtggtgtgatcttggctcactgcaaccgccgcttcctgcattcaagcgattctcctgcctcagcctcctgagtagctgggattacaggtgtgcaccaccatgcccagctaatttttgtatttttagtagagatggggtttcaccatgttggccaggctggtctcgaactcctgacctcaggtgatccacccgcctcagcctcccaaagtgctgggactacaggcatgagccactgtgcctggccaatagttgtatattgaagaggtgggtgtgagagatgccaggggaatggaagacactgatgggatatgaagatgaaaggatgtctggaaagccatgaaagcttatgggacaagacaatcactcttcttatggactctgagtttcaaataatataataaccctttggtgtgatgatcccctactatatgctctgtggggaacatacaggtttctaagacattgtccttgcctgtaatctagttgaggagatgtgtatgaaattgaaaagtgcctctcctacaaaagaataatggaaagtgacgaaggagagacatatacagtgtttgggggttcaggtaattagagaagacatcagaaagaagacccacaggatggttttaagggacttgtttgagatttttgaagaatagaaagatcttgatccaagtatatggaccccacttgactcttggacctttttccctcctactgttcttcatgagcacctattgcaattgaactagttcgtttactgtatttcaaatataccttatggaatctcacctctctcctttgttatctggaatgtccctcccatttgctgattttgagacctctggctcctgctgcctcttcaaatcctatgccttcttctctagaaggagtcaagtctgaatttgcctcagaaggtgtatcaatggatatagtttttctaccagaagaccttctctagagctttactgagtagtgtctagatctcactctatgccatgccaaattctcaaaaaaaaaattctaattacattcaagtagctgcaacaaatgttaaaacaactaaatctgggaggcatcaggagcctgagaattcttgtattcatggtgttttatgcatgtcttttaatcttaacatttttctgtagatgatataaactacagaaggtaaagactttgtctttgattggtttccttccttttctggacactgtctttttttgagacagagtcgccctctgtcatccaggctggagtgcagtggcatgatctcggctcactgcaacctccacctcccaggttcaagtgattctcatgcctcagcctcccaagtagctgggattacaggcgcatgccaacacatgcagctaatttttgtatttttagtagagacagggtttcgccatgttagtcaggctagtcttgaattcctggactcaagtgatccacccgccttggcctcccaaagtgttaggattataggcgtgagcccctgtgcccggctctctggacatatttttttaaatggtactgttataatggtactctcaggtcactgctgtaggaaagctattcttggcaaaataacagcataatataatgtagaacttgaaagaggaagctggcttaaagtcatcatatcttcctgtcccatcttcttcttagcccttcactaacaaacacataattttttccaattaaacaagaaaatcacacacacacacacacacacacacacacgaaaactgaatttatatttctagtaaacccacttggttaaaacaatctccagagcattctaagccgagcagatgtattgacaccagtggactggattaaattattatgccttgagggaatatcatctcatccaaccatcagaacttgcccatagttactcagatatttagtgaaggtgttgggagtttgactacaggttgtcttcagaacccatgctttcagctattacattattctccttcctatgtgttgatttttttacctaaattctatgcttttttttctctttttttcattaatttagtggcattttcaacactggacttaaaatgttccctgacctgaccaaagtttattccactgatatattctttatactgtaagtatgcacacatgccatgtttgacaatattttgtttgtcactgacaagaactagaatacagtcatgggggtaggttgaagataagtaaagcaattgtttcaaggactaagcaatgatcaggtgtgactacactggcatgaagtaaggcaaggactgagaaataaccactggctttagcaatgtggtttgttggtgactctgccaagaacagttccagtggagtgctggttggagtgggctcaagagagacttgggtagacagaattagaaagagttaccataattaactcttttgagaggttttactattaaaaggagcagaaaatagctcagtaattgcaagatattgagtcaggagaaaagattttgtttgtgtgtttttgtttttaaatggaagaaattatgcaatgtttctttgccaatgggaatggttgaatagaaggaatatttgatgataactatgataccttatttttcatagagttttaatagttttttaaacactttcccacacatgacatttgctcctctcagccaccttataaggtgtaaaacaaagttactgcttttccatttatgaatgaggaaactgaggaatagaaacctcaagtgattttgtctgagcagtgtctcaaggaacagtcaggagtggtacccaaattactgcctgtgacctttgattggcacccatgtgccctttttcaaagctggtgacatgggtcagttgtcttactaattgtataggaatgaaaggacgtaaggcagagagaattacaagttgagtttgcattaaagagtcagcaaaatgtagaatgataagcttcaaactcttggggttttgctagaaaaaaaaattgatcatacttctttgttgcaaaagagctcagttcaaaatgtaagcaatcttccagaaactagaatggcatagaaagtttctccaggagcctggcgaagtttggcaagtgaaggacattttagaaacactcattaaatgaaatcctttaatccttttatcctgaccttcttaaaggtccatgcatgtagaaaactctagttgttgtggacaaagtgttgcagattcgggagaagcctctcaaatccatctgcctaccccaagatgaggattaagtcagggacctccacccccacctaaagctctcacttaccccacatttgggctccaggtgcatgtcatctaggacagctctcaccacctcaccagacctctgagccactagcagttaagaagggtcagtgaaacttaaaaagaaataagattaagctatattgtgtcctgttatttaagtgcatacgtgcagcaagacccctgctgcagaaggaaagcattttttcattaagtgtttttgtccctctctcttgcagtgaaattacagacaacccttacatgacgtcaatccctgtgaatgcttttcagggactatgcaatgaaaccttgacactgtgagtattaccagttctactccctccatcaactaaattctattttgagccattttcatatgtttacagaccatccaagagccatactgccttatcatatatactctatagagtataaagtgttttacataattaaataagagtattgtcttatgggatggtactctgtagactacaaaagagtttaggtaacaagataagaggattccattacggcagtgattggtacatttttcacgtgaagaaccagttaggcattacagaccatgcaacctctgtaggaactggtcagctctggcattgtgtggcaaaaacagccatactcaatacatacactaatgagcatgtctgtgttccaataaaactttatttatagaaagaggcagtgaactagatttggccttcaggccttatggaataatcatctgtatccaagtttccccattctacagaagaagaactggggtttaagcaaattgaagtgacttacccaagatcactgagttaaaaaaaagtggtgccactaagaactttataaattctgcacttacacttttactcagtaatcacaaactgttattaagctcctgtaaggggatattacatagaaagcatagtgctgctataggtcagcatttttccagagcttgaatgggggcaaagccctttagatggtcaaaagtagatgcttaattagggatattcacaaaatgttctaaaggagaagatctaatagaggtataaaggataagttaattctccaagctggtagaaaattcctctctcattgtataagtcacaaagtagagttggagctacctctgcagggtctcctctctattttcaggaccactgcccaagttcaagcctggtgaagtttttgtctggattgtcaccccagtttcatttctctgctcacactaaagttggggtggaggtctttatcagatacaaacctgatcaaattactcaccagaaaaatggatccaagcttcatacagttcttctaaggggctattttctgagccattcctagtttatcagtttgggcccaatgaagttacctcaacttctgagagcaatggagcatttcagatgatccttctcatcacaacctggtgagcggtcccttgaaaagacaaaggaggctccttctcagtcataatttcttcttaccatgcagaaaaggcccaggctcttagcctgctcagctccaaacttcaaagccatttacttcctcagtaaagctttccattgcgccatatagtgctcatcataaggaaactcctacatgctaaacttctttatagaatattacctctaccccttgacaccatttttctaaaacccccatatctcaagcacccccctcaagtgaaagctcattgtcccacacctagcatagagcccagcatgtgtttctagaaacatctgagtgagggaagcccatatttcctaaaatatagaggagaggatggcatggattattcatgatcttttcagatgattatttctacattttggcaaaagtccttgcttcttcgaagctcaggctcaaaaaactatcaacatgaaaggatacatgttccaacaaccgactttgtacctgtattcctggtaggagaaagtttcagtcaaagtttgtaattcttttgtcttgcttcaccatgttcccttttcaaggccgatttgttcattaagaattctgtttaatatctgaaatgcaattcaaacaagtatttttaatgtccaggactctcaacaaatttaggaaaattaaaatgccatatgcacagttctcacatcttcataaaagagttctagtttagaaaaaatttacttatccacagagttttctcagccattgtgcttatattcctgggatattgcaatcctcacccaggacatgttagtagctggaattaaactcgctatgtaattatttaagatgaaacaaaaacaaacacatcaacaatgacaacaaagccatgagaatcttgctcagtttcccacaactatataggataaatccaagttttaggatactccttttatttatttatttttttaattttttttttttttttttttttttgagacagagtctcactctgtcacccagagctggagtgcaatggtgcgatctcggcttactgcaacctccgcctcccaggttcaagcaattctcctgcctcagcctcccgaatagctccttttaacatggtcacctaataagtgttcctcactttgttaaagatacagttatttgatcctctctgcaaccttttgattgggcattacatttatgtactaatttatcacatttttagagataacccttgagaagagacaggttgagaaattctcaggatcatccagcctttaagtggcagagctaggtctaattccaaatttgaactttcctgtgtgcttcttaatgtgttcccaaggttcacatgtggtagattactgtagttttcaaggttcccttacaactgccactaggagttctcactagcagtgcctgagtgtggttatagctgtcttctcttatcttcatgccaataaccaccaataacctcttgcattcccatatagcccagagctcccaaggctggggctccttctcctgcagaaaggggggctgcttttggtaggtggaaataattatatttgaggttggccaggcacggtggctcacgcctgtaatcccagcactttgggagaccgaggcaggcagatcacctgaagtcaagagtttgagaccagcctggccaacatggtgaaacccccatctctactgaaaaatacaaaaattagccggacctggtggcaggcgcctgtaatcccagctactcaggaggctgaggcaggagaattgcttgaacccgggagcagaggttgcagtgagcagagatcacgccactgcacttcagcctgggcaacagtgccagactccgtgtcaaaaaaaaaatcatatttgaagtcagggatcctaagtctcaacagtcctagaccaatgtgtttttggcaagtcaccttcatgtctcagtaacttcaataggaaatagaagtaataacatttcagactggctccctgaatcattaaatgaattaattagtcatagaaacacagcaacaagttaaaacattaacatttccagcccagtggttcacacctgtaatccccagtgcttcgggaggctgaggcaggcggatcacttgagcccagaatagcctgggcaacgtggtgaaacttcatctctacaacaaatacaaaaattagccaggcatggtggcacatgcctgtagtcccaactgtttgagaggctgaggtgggaggatcacttaagcccagggattcaaggctgcagtgagccgtgattgagccagtgtactccagcctgggtgacagagtgagagaccctgtctcaaaaaaaaaaaaaaaaaaaaaaaaaaaaatccataagaggacatggtctatctactttcttagattcgtctatgagatttaatttaattgagaccataacccttaaacatttaatctgtgataagctctgaggataaaaagatggataaaatacaaaggtgaaataacatttaaatattaatagaaaaataaaaacatatgcatttagatgaatgtctttcaaaatgtttatcttaagagactgcagttgctcctccactattgacattgggttaactattacctcaaatccctttttctgaatgtatgtggaatattcttttaaaatcttcaatggtaacaagtttgttactcaaagtaaatatgattctgagaaacaccttaaatttactaggagctaagtcaggagaatgggcattcaaactgagaaatattatcttgtttccaacaacttgtactggaaagttttcttgtgggatacatatgtgggacctgaaaaacctttatgcacatttatgacactgaagaaatatagtccaactctccagaaacaggccagcaccacttctcaccagtcactgatttctcttctctctgttggttgtaggaagctgtacaacaacggctttacttcagtccaaggatatgctttcaatgggacaaagctggatgctgtgtaagtcaagggtagccatgaaaactgtcactttcccttaccctaagaaccatccaatggggcagaatgctgttgagagataggttctaccagagcatcttccacgccagagttagtgtgaccaacatggaaatgaggtcaaggaacttggcaggggcccactttagtgggcgcttacgttagctccaatggtaagttccaaagcttttctccctggtgtgtgtgtgcgtgtgtgtgtgtgtaaatgttcatctattatgtacatgaagtaaaaggatatctttaatgaagcccaaagctgttcagaaaataaggtggtttctcttttagtcctttctgacatgtttttgggaaagatgtcagtttatatttgattcactcagaaatagctaaaaaatcatatccaacttttgccttttcaaaaaataaatagtgctgggaacagctgaaacagcaaacaatagactttgtgtttgatgtgttttataacactttttgagtatttctttacaaatgatatattttttctatttcacctttttctatttgttgtttttttcaaatttacctgctcatttttgctagtgtcttgttatgtattcggttttgtaattatattatttttttcactttaaacatttcatacatagtaattttatgttccagaaatgatccctgcaaaatctgaaggccttatgacacaaaatctgttgcgtacggggcttctcaaactttcctgggcatcagactctctgagaggtcttatcaaaatacatagtctgattctgtagctctggatttggcctcgggattccgtatttctaacaaactcccaggtgatgccgacactgctgttcatagaccacactttaagtagcaagggtgaggtcaataagctgtctaaccctatgcagtggctctggatggagaagaacactcatgtagattgtgtgattttcgttgatgttctggtttaggggttaggtggtaggttctggaacaattccatttttaaatggtaaatggtaaaaaggtgtttgaactcattacactgaggcaaggctccctgagttctgtttgaagtgaagtctcactctttgctggcttttgtgcttcataccagtctttatgaaatgaagagttacagtaccattctctcgattgtctggttgtggagtcataatggttcatttccattatttttttactacataattataggcaaagtctaaaaagactctatcgagtaaggtgatacttaccccctcaaatttatttacagaattggagagaccctccttccatcttaactttatgatactaacttcttacaatctttcatctacttttcaacatatttattagacacttgcaatgtaccaggccctgtgccattcactgggaaaacaaagatgaacaggagccatgtgctccctgcccacactgagcgtacattctggtgggggtcagctcaagggcagcaacatcaaagggcaaagtacattagggagaagtgtacccaatccaaaatatgcatctcagatagaaaataactgaagcctaaatatcgaataacattgctttccttctttggagatacaagctagattttttctaggtttatcccattgttttttaaatcattattaaaattaatgttttagaaatgaactaccctatattccaggtttcaagttctttttctaatccagcattctggaaaggtggcatttgattttaatatagtatgaatttcaccaaatattttcctctttgattcaactattcctagaaagctatgactctcagggtaatgatcttcaaattcaaattttctatgaatggagtatggagagttcttaaaataatgaagatagtttgtaggtacttagggtataaagatttcagatgactgtcacacagttgtagacatagagtacaccaaaagtttcgttagcattaaggcaacaaagactcacattagcaagggcagggataggagatagtaaggaaatcttcaaccagggaaaccagagctgttaatatggctcctgaattcagtgtgttcagctgactcttgcctgaactaaaactgcctttccagaatggtggattagagaaagaacctgaaacctgggatatagggtaattgatttctaaaacattaatttttccacaagcaaaagattttggagcccaagataagaatctatgcttcaaattaactgcctgtttttcctgccgtatttagtcattggaagatatgaccctcagacactatcaattatcattcattcaagatagagtataaaattcagaccttaaggtctacagagcaataattctcaacattagggagttttcaaagcactaatgcctaggttttgccgtcagacattctggatgtagcaggatcatggggatttaaaactctctccaagtgagtccaatacagagcaaaagtcaagaactactgctgtaaaatacattatcagtcttcttgtccaattgtcacgttttacatatgaagggaatgaagcccaacaagaacacatggcttttttttttaaacgtggctattttaatttgatagagcttcctagtggccaagtcaaagctgagacctgggtcccctggttcagaactctttccctgccctctgctgggatttatcatggctgacttaccagccatcaccaaggtgtggacatccaactctggcaagtgcagcttgtttcttagccctgaagattgcttagacttcttagctcaatctattaaaggcgctaaacacagaagttaaaatatcttgatcctgaaaaaaatgagatcatgtgagagaaagaaggcaactcaaaactcaaggcataatcaggagaagtttcagaggacaatcacatcaagaaacagtgttgttagtccacgagaacctgactttaccaatgctgcaaagccattcgtgagcttccagatgaagtctagcagcttattatcttatgaccagccgtaaaattagccacagagtatcaaaggagtttagagacattttctattgaaaggatggaaaaacgaacaagtgaacaataatttctctttgagcttctcctcagcctttgtgataagagaagggatgggagagggggagctatgttcctttaaactatatttcttcaactctctttccatagtaaattaatgggtattactttttaaaagaaatttatgatcttataaagttaaacaagatatataagtggacttttcagatcttctaataaaatcatctgaattatccatatcaaagagggggccttagtttgcagagcttctcaagcagttctcagttacaggagcatctctctggtctggtgttctacagacttttgaggggaataccgcctctgataggtaggaaaaaaatcaaggtgtttttctaccatcacacactcaatacaacagttttgacaccaaatgtttggaggtttttcccccacacagcaagtaatcaattctccaatgcacaccagctggatgtcctacaatttaactcagttctgatactctacctggagatagcatcagatccacaggttaaggtctcagtcccacaagactgcctgctacttcagatgccagtcacagctcccaggttgtgtcctatgcttctgactgaccaattataaatcagggttcccccagtcccctcctcagttcagttaatttgctaaagcagctcacagaactcagggaaacactttaaaggatattacaaaggagcagctgtgtggaaaagatgcatagggtgagaggtaggaaggagtgcagagcttccatgccctctctgggcacacaccctcccctcagctccacatgtgccttgaccaccttccagctacctggaagctcatccaaaccctctcctctctggctttgtatggaggtttcattacataggcatgatttattacatcactggccattggtgatcatctcaatcttttcagcccctgtctcctacctgaaggtgagaaggtggagctgaaagtccaaccctctaattatttattgatctttctggtgaccagccctcatcctgaagctatctagggattgacagtcaccagtcatctcatcagcatacaaaagacacttgtcactctggaaattccaagagttttaggagctgtgtgccaggaaacagataagaccaaatacatatttcacaatattacactactgaagaagaatctttcgatataccatctgcttgggaagcaggtaaatttaagaaggtttattcaagagatagctgtggagattctaagaactagtaaagatttcaaatgatcagatggccttctgaaattaaccctatggaaaaagtacacaaagtcctcacttagcatcccagatagggtcttgaaaactacaacttgaagtacaaacaatgtataatgaaaccaattttaccataggctagttgatataaataggagttgagtttctatagcatatttctggtcacaaaaacaaccaaacttttgcataaggaccaaaatgcttctaatgttaaatatggaaacaaatatgagctatacatacatttaaggtaggttaataaaaacaagagaattatttgcccaattattccagttcaaggtcacaggtggccacagcctattccagcagctcagggcacaaggtgggagccaaccctgaacaggacgtcaccccaacatgggacacaatcacacacaccgccacactcacttgaactggcaccatctagacacaccaagaaacctgatatgcacatctttggggtgtgggaggaaattggaatacctggagagaacccacacagacatggggagtgtgtgcacacttcacataaacagtagccctggcctggaaaggattttattctcattaaaactaagcagcagggtgcggtggctcatgtctgtaatcccagcactttgggaggctgaggcaggtggatcacaaagtcaggagatcgagaccatcctggctaacacggtgaaaccccgtctctactaaaaatacaaaaaaattagctgggcgtggtggcgggcgcctgtagtcccagctactcgggaggctgaggcaggagaatggtgtgaacccgggaggcagagcttgcagtgagccgagatcgcaccactgcactccagcctgggcgactgagagagactccatctcaggggaaaacaaaaacaaaaacaaaaaaaaaaaaactaaacaatagtgaatgagacaatattattagaggatctgctgtatatatagagactctctgtaccttcacaccagctttctcctcagaccataccatggattctgtgggaggcttagctgacggcagagatattctgtcagtgacaatggattttcaattcactggtgccatgacttactgtctaactatcccttgaaacataggaaagaaatcagtgtactatttcacaatactttcttgacatttttatgttaagtattaaagttatttggaagagtttaacaaatgtggaaactatttctttgttaagaatcttttgtgtcttggtttctaaaagtctagatcaggggtcagcaaactttttctgggaaaagcccagatcgcaaatatttggggccttatgggacatatggtcttagttgcactacttaagtctgcctttgtagtgtgaaagcagccatagacaatatataaacaaatgagcatggttatgttccaataaaactttatttacaaaaacaagggcaaggtaggatttgactggagggtcatagtttgtagacctctggataaaagtattcagtgaggatgaccattgtgtggcgaaatatgtactctgtttctctgaatttctggtaaaggttaaagggcaagcgtgggatcaagataaaaagtatctggattaaaatatttggcgttagaaagtacagatccaatcataatagaaaacaaattttttttaatcagtattttgaatccaagctggaaactgctcctgttataaaacaatgctccatcattctaccctaagtttctgactcctagtcaatagaaatttattctttcctagatttaagcacttcagtaaaaggtatcatgtaaatccagtgtaaaatcaaaatgatggttgtgataaggagccctgggactggaggaagacaaggattgagctataggtgaaggaaagaaaggtcaaggttccatggtaataataaaatagtattcacattgtgttttaaacatagggatgttgcttttggtctcaatgctaattaagattttaaactaaggcaaacacatcaatctcctgtaattatcttaatagtgttcaaggatttcacatggcatgttagcaatttggtaatttctccagaagtttgtccaggtatcattaggttctcatttaaacaatgtgtcaaccaaaagagcaatcatcccctatcattccacttcatgacaatttactgaaattagcagatcgacctcatttacactcattttttaaaatgtaactgaataatacaattacagccaagctggacaaattccacatcgagtgcaagtgctgatgcctcagcagcagtcaagtaattagttaggatttcatgaaaatgatggcagatgtgtaaaagcacattgtcctatgacttcctatggcgccaagaacgttgtcatcactcagaggtgaaattaataataatgcaagcatcccttgctcaacagaagttgaactgtacttggtcacaagttaagtcacacattcattgtttggaatctcttttccatcctctttccacgcaatctgcgtggggatatgttgcttctcacagaacgtctgattctctgtatcacatttcctattgtcaaactctagtaactagctactatctgacagtaaacatttaggcaggaataaaaataccattttgatatgctaagagcccaccaatacactaattattatgaacagagtcaacacaattaatgtgctaattagcatcatgcattagctgattcgaagtaaaacaccacatcttggcacactgggaaaagacaatgatagagaatattataggattaagaaggctattatttatcatggggtaagtatttgaacaacttgtaggatatactctaaggctgacttttccctctgcctattgaaagcttgagtattttctcacgggttactatttacaaacagctgtcctgatttctgctacaaaaggatttccatagagcaatccagcttctctttaaactaacatgagaggtaggcagggggtccctttaattttctgaattagcaacgctgtgggaggaaaacatggttccccacagatgtgctcccatgagagtctcacaacacaatcagggcccagcccaagttccccataaagggactgtggaggcacaggctgaaattccatcttggagctgaaatgtatcctaaaactccccagagagccaagttcagcagcaatagcaaattctcttgccacgacatcacactcctctctctggcatagatcacgtctttctaaacctggtatagagggtgcctctttctaggagtcacccaacaatcaggctttcattccttcctctggcaagtctttactgaatggccgctacgtgccacgagtgagtccaacagaaaagggcgtacataaacacacatatagtacacataatactgagtttgtcaatcgaatattttcctcagctcattcctcaccaccttcattttcctgactgcattggtcttccctaactgtgaactattcaaaattttaaatcagggcagggcttcttaactccatgtatggaaatctgacatctcttttctcagaagaacttcatttcttccaacaggttctcaaagaggaataagaccccaagcggtgaaaagctgttgaacacatagagatgtagccatgtctatcttatttttaaaggaaataccagttcttttctcataagccctttccagcatagatatttagaaaccctgactttcaaaaagtatttcctttcgtctcttactacaagccttttgagtctctttcaagctactttatgttcatcttctccttgcaagggatagtttttatcactcccctctaaaataatcattttctagagtaggttaaccagatagcctgccaagatttgtgactgatttatccaagctggttacaaatgtggatttcagaagaatcaatgtaagtcatggtcaaggaatcagtttaactagactgataatcccaggaaatgtcatgtgataaatgaggttgatggaagcactttcctggatatcaaggcttctgtatatgtattttccctccccactgtcttgacttcagatggaaggcaagagcagcaagctgatgcaaggttgaaaagctaaatgaggcagccctcaaatctgctgaaggcagagtgatggtttcacttttaagcatctaattaactctaagaggtaaagtaccccaacagccatgctggttttagagaacacagtctcctgaagtgtcagttcatctccgttcagcttggccagggctcctctgcatcctcctcctcccctcctggactctggctggcttttccagtctgaagtcttctgcagagtttctggtaaactgcaatgcttatcaaccaggctccttatcctcaggagtatattaaatatcagatgaaaacactgcagaattggacaagcaataatttagttttacaataatttctaatgattagaaagaacaagctgaatttcacttgcagcagttagagatgaagaggaaaaactgagatgagttcaccagctcttacttgattttcaacagcctgggaacagaatgtgatctgcaagctgcattgtccagagaatacaaaaagagatgcaagccagtgcagcccttgtactgaacttagttgtctttttacaaaatcatgctgttcaatatcttctctgcagttgttttttttttcaaggtggattttgcccactctgggtgtcactgaccaaaggaattccatggacatagtgggttaaaggagagtccaacaatgatcaagtggggattgtgattgaagccactgggaaggcacagattggctgctttagcatcttagccaggtctctgaatgcatttgagatttattgactctccctgtgtcacacttaacaatgccctgaatactgggtgttcagccactaccagaagaggccaagtttgggctatacccttgaggtgtttgtaaaccagatgccacaaaagtcactacctcaacaagaacagttggtcaaatgccaccacaccataagccaagtcttctattttttcgctcttcatgattttttctttaaagcaatcgtctgtgtcaccctaagagtttaacactgcccactttactgtcttgatgaaaaagtatgttgatttattttctactcattcacacattcatccaacaaatagttacagagatggtgaacttggcactgggtagacatagaactttcattctggctggggagacaaacaataaagtaaacaagtaaataaggtaataattatggattgtgataatgctgtgaaagaaatagagagtgtatggaggcaaaaatggtaatggctactttagattagctagttctcaatctctatttaagaagaaaattgggccggcacggtggctcatgcctgtaatcccagcactttgggaggccgagttgggcagatcagttgaggtcaggagctcgaaaccagcctggccaacatggtgaaaccctgtctctattaaaaatacaaaaattagccgggcatgatggcgatcacctgtagtcccagttactcaggaggctgaggcaggaggatcgcttgaacccaggaggttgcagtgagcagagatcgtgccactgcattccatactgggcgacagagtgagactccatctcaaaaaaaaaaaaagaagaagaagaagaaaattgaaagacccaaaaatatataccaatttatgacatgtcattttgtggagtctcagcacttactcgccatttagtgattccctcatcctgcacagaaaggagagatttcttcagcactggtgattggtaaaactcttcttcctcccacggttccaacgaagactcatgcctgggtccagttaaccaggagggaagtttctctgtgagggctctggagaagaaatccttccgactgaaggcttaatattattattaaccattacccttaaaaatgttccaccatgaagagcaaactccgtaagtagaataatggaagcattagccatatctaagcagaccttctgagggtctctgctatattcttttgcatcaacaggtggccactcactaatgtttaagtggaccaggttatgttgtgagttattctaaatgtgtaaattgggagcatttgtaacaaggatatatatatgtgctatgcttctttttagataattttgttgtgtaataaagttatggggaaacagccagtttcaaaatccttggaagcttttatccatttggagggaattttatttcaaaatcactttgtaacttaaatttctccaaaaacattttaccctctaatgcccagtatgtttttaaaatggaatggccaatgtgcccaccaaacctcttccatggaaggttgatgagattactctgtaatctcatctggctaaacactcctcacacacacactattgggttgtcagatcaaatacaggccacccaatacaatttgaatttcagatcaacaacagacaacttttaatataaatattttttaaattgcatggggaatatttttactaaaaaattattcattgtttatctgaaactcaaatttaactggcatcttgtatttttatttgctaaatctgacaactttacccaaagaaaacatctgaatctctgacagtcctcagcatcactcaccaccctcaccatcttcattccattcctaatttaagcctagtcttcaaagttaaattggaatataaattaatactaacaaacaaaatttggtattacagaggattggcattaaagagaattaaaaaatacagttgccactggcctgaaaaatagggaattaaaacaacttttaagaaatttaagtacgcaaactagatcataaacatgctcattttcaaaaacttctgccataattaatgtgtaaaactttatacaattgaaacctagaatgttttaagtgctcaagccagaagacgataaagtatcttctaaattcttgaaatcagtcaataaatactatggtcacattttattctgatatttgtactaatttgatgtgatttcttaaaatcacctaattcattctctctctctctctttctctctctccctctagttacctaaacaagaataaatacctgacagttattgacaaagatgcatttggaggagtatacagtggaccaagcttgctgtgagtaagacatacgaaagaatattttagtctttttttctttcttttttttttttttacttttttggaataaatggagacattaaggggagaatcttatgttcaagggtagaaaatgttgctgtctcgggtaaaggcttctgcaagtccctcttttcctggctgtataggctacctcttggaagaaagtccttgtcctttgagactcagaaggccccaagctccagtatgccatcatgatgcctgctaaggcagccaccttggtgtacatgctcacagaggctctgttcatggagcagctgctgtttgaaaaattttgaaatgcaaggtccacaactagatggaaggcactctagtctttgcagaaaaaaaatgtacctgaatgtacattgcacaatgcctggcacaaagaaggaagaatataaatgatagttcgactcatctgtggaagaacttacaatcatggggaaagatggaataaaaacattttttaaacagcatgagaacatacctatttgtgcatttcctttgatttacacccccacatccaatcagtgatcaggttctattgattctgcttccctgaagcctccgtatcattgccaccttcctcattcccttggttttgcctcagtttagaatctcgtcattgagcatccactctagtccttgccaaagtggatcacaggccgggcgcagtgtctcacgcctgtaatcccagcactttgggaggccgaggcgggcggatcacgaggtcaggagatcgagaccatcctggctaacatggtgaaaccctgtctccactaaaaatacaaaaaattagctgggcgtagtggcgggtgcctgtagtcccagctacttgggaggccgaggcaggagaatggcatgaacccaggaggaggagcttgcagtgagcccagatcgtgccactgcactccagcctggacgacagagcgagagtctgtctcaaaaaacaacaaaaacaaaaacaaaacaaaacaaaaaaacaaagtggaacacagcaccctagagatacacaagataatctgttaggggcaagaggaaatattagaggttctatttatacttatgtttaaataagaacaaattaagttttattaatcttttatttatagatagccactgtccctcaggtgtcaggtaggggtggatgcctcctagagaagggtgagtgatccacagtcctgagcactggataccttcactctttcacctttaacaatgttatttcactttcagattgaatgcacccagtgcgtttaaggtcctgttctcttaacacatacgctccatccaaataagaggtcagagtgatcttgaaaatctgctgtgccacgtgggggttcactgttaattcatggcaaagtacttaaaattattatgcatttttctttttacaagaagacaagtggggaaaaaatgtgttaaccttttctgtgataaagtccctgtcagtaatttttaacctggaagatatttttcaataacacttttatatctgcttcttcaagattaaggtactacttcgccaagtaataagaaaagtcattgctttttcaaagaaacgtatgctttagagaaaggctttagaaacaggtatttggaaatattcacatattatgcgattttcctgataaaaaattgtcaatgccataaaaattctgtttggttcaaatcagaaatagaattttaacttgtttttaaatctttcaaattaagtttgttatgaactaaattgtatctgtcttcctaaattcaaatgctgaagccttaacctctagcatcttagtatgtgactgtatttgaagatagggtctgtaaagaggtaattaaattaaaataaggctgttaggtgagccctaatccaatatgacaggtggcctcataagacaaggagattgggatacacagagagacaccagggatgggcgctcacagaggaaaggccacgtgaggccacagcaagaaggtggccatctgcaagccagggagagaggcctcaggagaagccaaacttgctgacactttgatcttggacttgcagcctccagaactgtaagaaaatacatttctgttgtttaaaccagccaatctgtggtattttgttaccatagctctagcaaagtaatacagagttgtagcaggtttaaaatccatgtgtataaaatgtgaaaatgaaacacctccagatcaccttgcaaaaacaactgattgacatcagaaaatataaaatttcattaaaagcatgtatttaattactgaattagattgaaaaatgagaatcttagtttaataaatgcagttaagcctgctctattcttggtgaaacacccatctttggtaattttttcaactaggacggccatttaaaccaaaatcaaaataaactgaaccaaaagcagactttgaacagccatagccaaaagggttaaaaataattttcaaaactaattaagcatatttgataacattgcttttgcttttatgaaactttaaaaaatatatattacttatcttcattgcattattttaaaatgtatgtttagtgtgttatggtatatattatatagtattacaaaaatacatgtatagggttcatgactgttcatatgttagtggtacatactcagatattttttacttattaatatgtgagattgaaagaatttgaagaccaatagtgtagaccagaaccactcaaagtgagttcattacaaggtaagtggctgtccaggatatacagcaaagcacagcttcttttttggagaaaatcttgtcatgaaaatgaagtcaaccaaactcaacagtgtgtttagttgaagtagctggcttacatccagcatatgcttcttatccttggaatggtaagaagctattggccaatgggcaccataggttgagtagcagtagtctagatgattagcgtctccaaatctggctcctgcctttatttagtcttggttcctctcaaatccaccctccccaaacctctttgggttcacatgcaaatagaatcttaaacccaatactggcctcccattcccctcaggatagaggtcttggtgtggcttgcaaggcattgccataatcttcagctttgtcttttacactactttacgcctctgatcaatggtccatccatatcgaacctcttagctcccttaattctccaacctacttacactgttatgctaaactcttactcttcctactgtctggaaaaccctgctataatcttgtctttctgatgagcacctgctggcattttaattctgccttagagggcagaattgtatttccacaattctggttcatattataatgcccaaaacacagtatgagcttaataaatatttgtgaaattaatatggtacccaataaataattaaagcactcttctgtaaacactatagcatttaaagagcaatcatattttaaagatattttagtctgttgtcctcaagggaatgtgtccatttctacttctttggaagtggtcaattaaactacctgcttgtactgcctcgaagttgttttttatatttatggcaagattttctacaagactctcccaccaagttaagaggatttgtgaaactgcctgaaaatgctttccctgcctcttggtggcattccaggttgtggaaagtgacaaagatgaggagttatacctggagttgactcccagccccatcacttactaactgtaagacccaagtctcagttttcacatctgtcaaaacaggataaagtaagctaataaagtttaaataagataataaaggaactaaatatatcctcaataatgttagacattattatgattattttcacttcttcctgaactttgacacttcattattctgatctgttgtaacctctctgatcactccttccccatttctctccttagctcactgcatcattcctcaaaatggggttccatcctgggtcctggctctttttcctctatatcttctcctttggttaaatcatctgctcacaagtatcatgagaatgtgaatgatttctaagtttagggcctcataccttagctcttatttggccattcacccagctgaaattcttttcttgctccctctcattcctatccaatcccatcaatctggttaaactctccctagccagcctttgaaaatgtacaataagcatttactgatgagaacttgctaagcttgggattcttcactgggaactaccagtaggggaaggtcactacattaaagaacagtgagtgaaaagcctcatcaagaaggtggcaattcagaaaatatctgaaagaaacaaaggggcaagcctggggacaatctgaagaaagagcattttagacaagtacaaagacccccaggtgagaatatacctggcacatttgaggaatagcaaggaggccattgctgctcaaacagagtgaagtaaacaggggggaaaagtaaaagctgtgatcaaaaagatgatagggttgaggagcaacttgcagatggtcttagaggccatcatcaggtcttttgatttgctctttagatagaggggaagccataggagcattttgagcataggtgtgtcacagtctgactcaaagtttcacaggaacatgccggctgttgtgttgaaaataaactgtagggaaccaagtatggaagcaagaagaccacttaggaatatgccaaaataatataggcatgagatgaaagtagtttgcactaagacagcagcagtagagatgatgagaaataatctgatcctgactatattttttaaggtaaagccaacaggacatgctgatggatcggatatagcagatgatgagagaaaggaaggaatcaaggagaactgtaattatttttgactgagcagttaggagaatgagatcactatttcctgagatagggaaagttagtttgaggtctcatgatgcatgcaagcaggcagtgatatatatgggttcaaaagtcacaataggggttagggctagagatatatttgagactctttggaatgtagctggtgatgaggggatacaggtatagaagaaatctcaaaaaatgaatagaattgagacttctgaactctccccaccaatgtgatttccctgatccttttttaaacaacattaaaatgacagtacttctgagaaaatataaatacattaaaaagcatgtatttttaatgacaaagagtaggaaaggtgatcatgtgagtaagtgacgagtgtcttcaaaaaccaagagagagctgcacgctaagtacttgcatgggtgaaatcaataaaatgcaagctaattcaaatcacaaaatctaggaaatattttatcaattaaatcttaagtgttctgcaaatgagaatataggtgacactgaagctggtcggtctcattctgcacagtcaagcactacttcttactcatcccagaaaaaagactagaatttgctttctgttaaaatgtcatcaccaagactcaaggagaataagcacagttggggttagaaggcaggtactgttctgaaaacaggattatatgaaaatttacattctaaaatgtaagaataacaatcctcttatccactcactcaactcatagaatattggcaaaatgtataccctccaagtaagagatgagagtactgaggaagctgacaggcccaaggaaaagaaaaaaaaaaaaaaacctacaaaaagaatcactgtgggggaggagccaagatggccaaataggaacagctccggtctacagctcccagggtgagcgatgcagaagacgggtgatttctgcatttccatctgaggtaccgggttcatctcactagggagtgccagacagtgggcgcaggtcagtgggtgtgtgcaccgtgcgcgagccgaagcagggcgaggcattgcctcactccggaagtgcaaggggtcagggagttccctttcctagtcaaagaaaggggtgacggaaggcacctggaaaatcgggtcgctcccacccgaatactgcgcttttccgatgggcttaaaaaacagcgcaccacgagattatatcctgcacctggctcggagggtcctacgcccacggagtcttgctgattgctagcacagcagtctgagatcaaactgcaaggcggcagcgaggctgggggaggggcgcccaccattgcacaggcgtgcttaggtaaacaaagcagcagggaagctcgaactgggtggagcccaccacagctcaaggaggcctgcctgcctctgtaggctccacctctgggggcagggcacagacaaacaaaaagacagcagtaacctctgcagacttaaatgtccctgtctgacagctttgaagagagcagtggttctcccagcacgcagctggagatctgagaacgggcagactgcctcctcaagtgggtccctgacccctgacccccgagcagcctaactgggaggcaccccccagcaggggcacactgacacctcacacggcagggtactccaacagacctgcagctgagggtcctgtcttttagaaggaaaactaacaaacagaaaggacatccacaccaaaaacccatctgtacatcaccatcatcaaagaccaaaagtagataaaaccacaaagatggggaaaaaacagaacagaaaaactggaaactctaaaaagcagagtgcctctcctcctccaaaggaacgcagttcctcaccagcaacggaacaaagctggacggagaatgactttgacgagctgagagaagaaggcttcagacgatcaaattactctgagctacgggaggacattcaaaccaaaggcaaagaagttgaaaactttgaaaaaaatttagaagaatgtataactagaataaccaatacagagaagtgcttaaaggagctgatggagctgaagaccaaggctcgagaaatacatgaagaatgcagaagcctcaggagccgatgcgatcaactggaagaaagggtatcagcaatggaagatgaaatgaatgaaatgaagtgagaagggaagtttagagaaaaaagaatagaaagaaatgagcaaagcctccaagaaatatgggactacgtgaaaagaccaaatctacgtctgattggtgtacctgaaagtgatggggagaatggaaccaagttggaaaacactctgcaggatattatccaggagaaattccccaatatagcaaggcaggccaccgttcagattcaggaaatacagagaacgccacaaagatactcctcgagaagagcaactccaagacacataattgtcagattcaccaaagttgaaatgaaggaaaaaatgtgaagggcagccagagagaaaggtcgggttaccctcaaagggaagcccatcagactaacagcggatctctcggcagaaaccctacaagccagaagagagtgggggccaatattcaacattcttaaagaaaagaattttcaacccagaatttcatatccagccaaactaagcttcataagtgaaggagaaataaaatgctttacagacaagcaaatgctgagagattttgtcaccaccagggctgccctaaaggaactcctgaaggaagcgctaaacatggaaaggaacaaccggtaccagctgctgcaaaatcatgccaaaatgtaaagaccatcgagactaggaagaaattgcatcaactaacgagcaaaataaccagctaacatcataatgacaggatcaaattcacacataacaatattaactttaaatgtaaatggactaaatgctccaagtaaaagacacagactggcaaattgaataaagagtcaagacccatcagtgtgctgtattcaggaaacccatctcatgtgcagagacacacataggctcaaaataaaaggatggaggaagatctaccaagcaaatggaaaacaaaaaaaggcaggggttgcaatcctagtctctgataaaacagactttaaaccaacaaagatcaaaagagacaaagaaggccattacataatggtaaagggatcaattcaacaagaagagctaactatcctaaatatatatgcacccaatacaggagcacccagattcataaagcaagtcctgagtgacctacaaagagacttagtctcccacacattaataatgggagactttaacaccccactgtcaacattagacagatcaaccagacagaaannnnnnnnnnnnnnnnnnnnnnnnnnnnnnnnnnnnnnnnnnnnnnnnnnnnnnnnnnnnnnnnnnnnnnnnnnnnnnnnnnnnnnnnnnnnnnnnnnnnnnnnnnnnnnnnnnnnnnnnnnnnnnnnnnnnnnnnnnnnnnnnnnnnnnnnnnnnnnnnnnnnnnnnnnnnnnnnnnnnnnnnnnnnnnnnnnnnnnnnnnnnnnnnnnnnnnnnnnnnnnnnnnnnnnnnnnnnnnnnnnnnnnnnnnnnnnnnnnnnnnnnnnnnnnnnnnnnnnnnnnnnnnnnnnnnnnnnnnnnnnnnnnnnnnnnnnnnnnnnnnnnnnnnnnnnnnnnnnnnnnnnnnnnnnnnnnnnnnnnnnnnnnnnnnnnnnnnnnnnnnnnnnnnnnnnnnnnnnnnnnnnnnnnnnnnnnnnnnnnnnnnnnnnnnnnnnnnnnnnnnnnnnnnnnnnnnnnnnnnnnnnnnnnnnnnnnnnnnnnnnnnnnnnnnnnnnnnnnnnnnnnnnnnnnnnnnnnnnnnnnnnnnnnnnnnnnnnnnnnnnnnnnnnnnnnnnnnnnnnnnnnnnnnnnnnnnnnnnnnnnnnnnnnnnnnnnnnnnnnnnnnnnnnnnnnnnnnnnnnnnnnnnnnnnnnnnnnnnnnnnnnnnnnnnnnnnnnnnnnnnnnnnnnnnnnnnnnnnnnnnnnnnnnnnnnnnnnnnnnnnnnnnnnnnnnnnnnnnnnnnnnnnnnnnnnnnnnnnnnnnnnnnnnnnnnnnnnnnnnnnnnnnnnnnnnnnnnnnnnnnnnnnnnnnnnnnnnnnnnnnnnnnnnnnnnnnnnnnnnnnnnnnnnnnnnnnnnnnnnnnnnnnnnnnnnnnnnnnnnnnnnnnnnnnnnnnnnnnnnnnnnnnnnnnnnnnnnnnnnnnnnnnnnnnnnnnnnnnnnnnnnnnnnnnnnnnnnnnnnnnnnnnnnnnnnnnnnnnnnnnnnnnnnnnnnnnnnnnnnnnnnnnnnnnnnnnnnnnnnnnnnnnnnnnnnnnnnnnnnnnnnnnnnnnnnnnnnnnnnnnnnnnnnnnnnnnnnnnnnnnnnnnnnnnnnnnnnnnnnnnnnnnnnnnnnnnnnnnnnnnnnnnnnnnnnnnnnnnnnnnnnnnnnnnnnnnnnnnnnnnnnnnnnnnnnnnnnnnnnnnnnnnnnnnnnnnnnnnnnnnnnnnnnnnnnnnnnnnnnnnnnnnnnnnnnnnnnnnnnnnnnnnnnnnnnnnnnnnnnnnnnnnnnnnnnnnnnnnnnnnnnnnnnnnnnnnnnnnnnnnnnnnnnnnnnnnnnnnnnnnnnnnnnnnnnnnnnnnnnnnnnnnnnnnnnnnnnnnnnnnnnnnnnnnnnnnnnnnnnnnnnnnnnnnnnnnnnnnnnnnnnnnnnnnnnaaccacaatgagataccatctcacaccagttagaatggcaatcattaaaaagtcaggaaacaacaggtgctggagaggatgtggagaaataggaacacttttacactgttggtgggactgtaaactagttcaaccattgtggaagtcagtgtggcgattcctcagggatctagaactagaaataccatttgacccagccatcccattactgggtatatacccaaaggactataaatcatgctgctatgaagacacatgcacacatatgtttattgcagcattattcacaatagcaaagacttggaaccaacccaaatgtccaacaaggatagactggattaagaaaatatggcacatatacaccatggaatactatgcagccataaaaaatgatgagttcatgtcccttgtagggacatggatgaaattggaaatcatcattctcagtaaactattgcaagaacaaaaaaccaaacactgcatattctcactcataggtgggaattgaacaatgagatcacatggacacaggaaggggaacatcacactctggggactgttgtggggtgggggcaggggggagggatagcattcggagatatacctaatgctagatgacgagttagtgggtgcagcgcaccagcatgacacatgtatacatatgcaactaagctgcacaatgtgcacatgtaccctaaaacttaaagtataataataaaaaaataaaaaaataaaaaagaatcactgatagtctcccaaagtcaccatagtaatgcccatcagccaataagcttccacacacagagcttcccataggcctcccttaccaacaagaacagacatccaagaaccagcagacctttgaggaaatccattgacatgaaaaatgtcaatgtcttagagttttcagtatacagatctttcacctccttggtttaaatttattcctattttttgttttgttttgatgccattataaatgggattgttttctttgtttctttttctgatagcttattgtttgtttatagaaacacaacggatttttgtaggttgactttgtatcctgtaactttactgaattcatttcttagttctaacaggtatttggtggaggctttccaattttctttataagataatgtcatccacactcagaaacagtttctcttctttctttaggatttggacaccttttatttgtattgcctaattgttctaactaggacttccagtactatgttgaatagatgtggtgacatgaaaaacaaggactagaataaacagaaaaaggaacttggaaggaacagaaacaatgcaagaaccagaagaaaactttcatgaaagttataacaaatatcctcagcgagacaatgttttacatgtgcaaaataattccttatacaggaatattcagaaaacaataaaagagcttttgaaaattaaaaacatgaaagccaaaaccaaaaaagtaagcagaagttgttaaagataaagggaaaaatggcactcagtagagacagcaaaaaaatatgaaatagaggaaagaaaacacatgaacattagaaattcaagccacgaggtccacaacccaactaacaaaagttttaggaagagaaaacaaaaactgaaaaagaaaatagtgtagcagatttcccattaataaagaaaatgaattttcagaataaaaagacccacagagaacccatatggcaaaaaaaagagtggggaggcatgaaggtacatcataaaacatgaaatcaatgggataaaaataataaattaaaggcgtctagacagagaaatcatgtggcctgtgcaggctggagaatcggaatgccatcagccttctcaatggcgacactgaagaagaccatagatagaatacaccttttgaattctgaagggaaagtcatttccaaactaccaatcaagtatgattgataaaataaagatattttctcacatgcaaaatctcaaaaccttgatttcctattcaccttttcttggagaataaaccaggaaagagaaaaatgaggactttgttaaaacagtgatcaacacaggaaagaagcaaatagaattcccaggatgaccacaaagggaggtctgaggagtcttgagaacatgatgtctacatcagagctgaagaatgaagactccaagaggaaggtcttctagaaataaaagagggttggctgggcacggtggctcatgcctgtaatcccagcactctggaagacagaggcaggcggatcacttgaggtcgggagtttgagatcagcttagccaacatggtgaaactccatctctactaaaaatacaaaaattagccaggcatgttggtgcataattgtagtcccagctacttgggaggctgagttaggagaatcgcttgaacccaggaggcggaggctgcaagtgagccgagattgcaccactgcactccagcctgggagacagagcaagactctgtctcaaaaaannnnnnnnnnnnnnnnnnnnnnnnnnnnnnnnnnnnnnnnnnnnnnnnnnnnnnnnnnnnnnnnnnnnnnnnnnnnnnnnnnnnnnnnnnnnnnnnnnnnnnnnnnnnnnnnnnnnnnnnnnnnnnnnnnnnnnnnnnnnnnnnnnnnnnnnnnnnnnnnnnnnnnnnnnnnnnnnnnnnnnnnnnnnnnnnnnnnnnnnnnnnnnnnnnnnnnnnnnnnnnnnnnnnnnnnnnnnnnnnnnnnnnnnnnnnnnnnnnnnnnnnnnnnnnnnnnnnnnnnnnnnnnnnnnnnnnnnnnnnnnnnnnnnnnnnnnnnnnnnnnnnnnnnnnnnnnnnnnnnnnnnnnnnnnnnnnnnnnnnnnnnnnnnnnnnnnnnnnnntgcctcaacctcccaaatagctggaattacaggtgccaacaccatacctggctaatttttgtatttttagtagagatggggtttcaccatgttggccaggctggtctcgaactcttgacctcaggcgatccacctgcctaggcctaccaaagttctgggattataggtgtgagccaccgctcctggccttgggaggtgttttaaagaacattggagcatgtagaaaacttagcaagaggtttgttcaaacaaagacacccaaataaaaagagagagacagatggacatcttatgaaaaaaaaagcaaacagttacatgacaaaggaaatatgcaaagttgcaataaccacagtactgaatatgggtttaaccaaatatgtcacaaaactatttcaggagagtagaggagtgtgtcaggagaggaaatgtgtaggggtgagggatgataaaagaaagccaaatcctcatcttctatagtagagagtcagcggataaaatctaaaaacaatacatcaagaaatacttacacttatggaaggaaataccagaagttaaaaggggttacttctgggacatcagacaccagactgcagagaagggctgcctcttgtattaacaagcttccagtataatttgctttttaaaaataggtccatgcattattttaataaaaattaggctgggcgtggtggctcaggcctgtaatcccagcactttgggaggctgagggggtgtggatcacttgaggtcaggagttcaagaccagcctggcctacatggtgaaacgccgtctctactgaaaaatacaaaaattagctaggcgcggtggcaggcgcctgtaatcccagctactcgggaggttgaggcacgagactcgcttgaacctgggaggcagaggttgcagtgagccaagattgcaccattgtactgtagcctgggagacagagcaagactccgtctaagaaaaaaaaaaaattaacacttaatttaataacaaagccacaaagcataggaagagaagacaatggagatgtcagcatgtgagaggtcaataggagaaaagtaagaaatgaacaaagaagagtccagtctcattcctgaacttccaagcatagttgttgtctgaaaatgaatttgttaactaatcatacatagacgtgtgacgtctctttaattcttgtcttgatcttttgtcaaaatctccattattttttcccacatagcttctttccataattagattttaagatcccagaggaaataagtggtgtcttatactttttataaccttcctgcctcaaaacagaagacagaaagtgctcaataaatatcggatgaattgtaactaaatatcaaatagccatgatttcattgtcatttgttgtcaaagccaaacttcgaaaatcgtaaactccatctaaagaaaagagaatcagatgccatatatatttctgccttataaaggtttttgagggacaatacagtcatgtctaatagtcaacaacaacaaaaaaatcaaacttacccacttaatcatcgtttttcaaggtcacttctcaaaagataatctaatttaaagcaggtgcaatatctagagtcagaggatctattatccaatatttgctgtttttcaaaaagacataaatttagtttggaagtataataaggttttttattgattgatttttaatcaagatatgcaatctcattttccatttttatactttccatttttgattaccttgttttctttttatcttattttgaaagagaagtgcttggtgttttaaatctcagaggaaagaacacactgaaatgcaatgcctttcataataatcagagttctctaaattctaaattatgtaacccactttaatatagcatttagcatattgttgagtaagtacctcctaagaagaggaaatctctgtaataatatccttgagtttgcattacaggtatcagcataaataaacttcaaaaacacacttttcttgtttttagctgatcaaattaattcaagggtcatggcactgtcatatttctttggtttcttttttttctttttctttctttttttttttaaactcttcatgatcttcacaagataatactattaggtggctgaaaatttgtggcagagtccttaccggcatgcctgaaagacacaggtgaatacacgattttctaggatgatcctgagcaaacttatattttaaatataatttgcatacaataacatacacaattttttaagtgtacaggttgatgcgattcaacaaaactatattactctagcctgattaagacttggaacattttcatcatccagaaagttccctcatgcctcaccccacctcccatagacatgctatttttctaatataaaaatttagtagtaaaattaacaggtaataggatagatgtatatctctatatacatgtctttatgtatactttataggaaatactgctacgctgttttccaaaagggttgtctcattttctattctcaccagcaaggtatgagcattttatactggccaatgcttttaattgtcttttttttttttattctagccattttaatgggtgtctcattgtggttttaatttgtgtttccctgattattaatgatgttgagcatctttttatgcacttgtcagctatttgtatattttcttttacccagtttctgttcaaattttttgcccattttcattggatttttgtctttttattattcaattgtgttccaggataaaatttttgacctaaataaaattttggtcctggccaccagctctctgccaaccctagtgcaaatggtccatttactcacttattccacaggcattttactaagcacctactgagctccagtagttataaggataagacacagcctctgctttaaaaaggttacaatcaaatttaggagaaatgtgaataagtaactgtaacataagtttaatgtaaaaagccataggagatatttagagactgaacatgacatttctagttagggtgatcagcgaaagctttattaaaggagatagtatttgagatgggcttcaggtgaggggcagaattgcaacagacagtgatagagttatgagagaaaacaaaggcacgtctataggaaaacatgggatgtgttcagaggaaaaaaaatgacataattcaggcaaaaggatagtgttgggatgttgtgttgaaatcatactatggacaacctaatctgacgcagcaggtaaagatggcccctgtggaagtagtagtaatagttgcataacagattaaagtttgtggccctcaactcacctcagccctgactatattattgctgatacctctgtcacagccactgagctgggactgctaatctgcacctcctggcaatttgacagggactggatctccctctgaggggagggaaattgagccccaaatacctcatcagcctggagctccttgactttctttctgtgcttaccaagtgaagctcttggtacagctcccttggagaagggaacctcctgcagatgcaaagccaggggaggcttgcatgctaggctgccctgctcaccgaccgtgaaatgagttgcaaacacaagacaaagacaaactgccgtcttgcacacctagcttgggcaccaagccagacctatgccaaaggagccgagttgttggggaagcaactgaagtaggtcatccctcctaagtcacacgctcacatctccagaggcacagcaaagggtctgcaaggaagatcatgaaagaatttgaagagagagagagtaggaaatgatctttccagaatggtgtgcatgctgacttcttgacaagaacagggaatggtctgcttcagccctaggaattttctgaacagaagagtcaattgacaactcaggatacttggtttccctcaaaatcctaatttattgatcggtagcatctcctactaccatagccactattatgagaaaaaagaattaatacattaaatcacagcaatctatattggcaaggtactttcataactattgagaaattgtttgcagagcagtccccaactagttggctgcctgctggtgggagagggataaagcagttagtgcaaagatcctcaaaatcatacaaacctttgtacttcttcaactgactaacagtgcaactactatcatccccgaaagatttttagtttaaataacagttctccaaaacaccgggagccactgtctagaacaatggcctcaaatggtcatgcattttatattaggggattcagtctgaataaatgtttcctaactatgccaggacaaaaagtaaactagaagagcttttcttctctaaaaataatttgcaaattcataaaatatttctttagcatggttttgctaaacttatttatttaagtaagggctttttaccttgacaaaaactggtagaacataaaagaatttttgctgagaatgaatactaggaaaacaacactgccaaaatgttctaaaccttataaattctgaaccattttattaactaattatccctctttagccaggagctcgttaacagtaaagaatctgaagtttgttctatgttgagcaagtaggacgataattacttcttcaatgttccttctttgcaattttatgtataaataactctaccttttagtgagtgcccattaggctctgtgctattttttacataaatttgatttcagccttccaaccccaaaagattctgacttctccacacactcttctcagttttgggtgattttgcccatttcaagtctcaattatctgtataatgaaagaagagaaacaagattgcataggaccaaatagtaaaggcaaaagccatgtatactatgttctatagcagattttacttgtgattttacaattaattggaggatgctggcaacaggctaaataatgacaggtataaatcaaccttggattaaatttttgaataaataacagaaacacaaaaagcagtttttagcatgtagaattaggcacacagttcttcccaagtaaatgtggatgggtactaaatgttttcacttttctgggagtttactcctagatcaggtgggaggaaataatcaagcattgtcatctgacacactatctctgccaggacatggaaatctattttgttaattacattctgcctctgagtctaaaagaaataaacgctttaaaaaaaagtggaccttttatctcccacaagcagcattgagcctgacccttttgccagtacgatgatgatcattttgggtgtgtgtaggggttgtgaggttgagaagggaggggattcaacattgaggaggaggctatgcttgtgtttcagcttcagactattggcagttgatatggtttggctgtgtccgcacccaaatctcatcttgaattgttgctcccacaattcccacatgttgtgggagggacccagtgggagataattgaatcatggaggtggttcccctatactgttctcgtggtagtgaataagtctcacaaaatctgatagttttataaggggttccccctttcacttggctctcattccctctcttgcctgctgccatgtaagacgtgccttttgccttttgccgtccaccatgattgtgaggtgggaggcaacgtggaactgtgagtccacattggggaactgtgttccccagccacgtggaactgtgagtccattaagcctttttctttataaattacccagtctctggtatgtctttatcagcagtgtgaaaatggactaaaaattgccctggtttccttttgtcactgtgtggtagaatgttgactcaccaacttacaggatacggcaattttccattgcagaatccattatgttgcaatagtaaacgctgaaagatttcatagatcatggaaagtataggcttataagaaatgattgtagtaatatctgagttataaagcaattttatttgtacacatagactttaagaaaagattcataatttctgatcaattttctgaatagtcagacacaaattttcttattaataacaagtcatttttgagcattagctttgtgctgggttctttacagatagtctatcactttgggcctaactattcaatagaaagtattcttattcctatttaacaaataaggaaactggtgcagagatatcaggtaagtcccccgaggtcacctggccataagggaaatactaggatagaaattcagtattaactaactccaaaacacgatctcttcctggtgcatcaggtcaaccccttttatgtaagattattcttgcacctgttgtaattctgcaactttacttgatcatattcttaaatttctgcttaaaagcctccagtggtggtttaccatcttcatttttaaagagacaaagtcctcacaaatagccttcaaagacctatgctgtttgtctcccacccatgccacgtattctctcatcctacctcctatttctttcctcctcatggttctaccccagccacactgaataggacacatggcatgttcccaccttaggggttgggcactagttgttttctctgccagagagccctctccccagatatccatagctgtctccttcgtctgatacaagtctttgcttaagggtaagtttctcattgagatcttccctgaatgccctatttaagtttgcaaactgcccaccactcttcatcccactttcctgttttatttttccccatgatgcttattaccatctgacattctagacatttgcctacagtggtaccccctttactcatggaggatatgctccgagacccacaggggatgactgaaacagaggagagtccctaaccctatatataacatttttttcctccaacactgctcctgtcctaactttggttatttcaatatccacatggattatctttcctataccttgacctctgagctccactcccccaataagcctgcccttcattgtacttccaggcttcactagacctgtcatgaccaatgactacaaagcctccataaccttaatcttaaacatcctgctctctttctatctctttccttagaatacgttaatccttcaattttttggttctgccaggatctagtctgttactaacgtttcactgtctctcacctccctcatatcctcactctttccttatgcagcttaaatgccatgttctgtcattataaacactgacttgtatatgcagccaactaactaccttgcctctctgtctcatcagcctcttctggccaagcccaaccctggttaggtctaaccacccacctgcttcaggcctgggcttttgcagctgaacatagcaagtggtttcaccttaaatcattcaccccaagcaggctctacctgctgcacagcaatcacatcccacttccccattccctctcccattctgttggatgaccatgtcctatggcctcccctctcttcagttctctagtcctctccctcattctcatgtccacttgatcaccttgatttccatttcactgagcataaaatcaatccaaagagaactcctcatgtcccactaacacatctacccatcttcctgtgtctatgcccacatcctttctcctctcttccgtattttaagtcattttttaaggctggccccttcaccggggccctagatcccatcccctctcaaaaactcaaggacgtcgcttcagcaatcctctcccttcttccctaatcatctgtattcccctccctactaagttatctcccatcagtgtataaacatgctgtagtttcttccatcttaaaacaatgtttcgtgaatatggattaaaagacgcctaagagacatcaattgaatgccatgtctgggtctatttggatctgacttaaacaaggtaagaactaccttgcctttcttggaaaactgatgattgaatattacatggccttaaagagttattgttttagatgttatttatttttaaaagattccttaattcttagaaaatattgaaatatttataattttaaaatatcccttccttcatatctacttccacctactgccctatttatctgtgtctttttgcagcaactatcccaatttctgttatgctcactccaatcaggttttcacttcccaccatgccactaaaactccctttacacggtcaacagtgacttccacagttgctaaatcaagtggccaattgaatccaccnnnnnnnnnnnnnnnnnnnnnnnnnnnnnnnnnnnnnnnnnnnnnnnnnnnnnnnnnnnnnnnnnnnnnnnnnnnnnnnnnnnnnnnnnnnnnnnnnnnnnnnnnnnnnnnnnnnnnnnnnnnnnnnnnnnnnnnnnnnnnnnnnnnnnnnnnnnnnnnnnnnnnnnnnnnnnnnnnnnnnnnnnnnnnnnnnnnnnnnnnnnnnnnnnnnnnnnnnnnnnnnnnnnnnnnnnnnnnnnnnnnnnnnnnnnnnnnnnnnnnnnnnnnnnnnnnnnnnnnnnnnnnnnnnnnnnnnnnnnnnnnnnnnnnnnnnnnnnnnnnnnnnnnnnnnnntttcatttcaccttcccgttggtgaatgcttattccagcttgtagggatttaacttaatgcctatgatacccaaatagaaaatctccagtccagacaattctcccaaattccacgcttataaaacactgcttgactgccgtcaccatctggatgtccaataggcatctcaaacttgacatgcccgaaagtgaacttctgatcattccctccaaacctgcctcacctgcagccttccccatctcaggaaatggcaacttcattctcccagctgcagactagaaatcttggagtcattctcaacccttccctttctcacataccccatatcccatccatcagaaagtcccaacggctctacttttcaaatatctacaaactccaaccattttcggtatctccactgctaccaccctagtccaaagcaccatcctctctatttttggtctccctgtttccaccccttactcactttggtaactttcaaagcagcagccagcatgatcctttttaaataagtcagattataccattcctctgcagccttttgatctcacttccatgaaaatgtaatgttctttcgacagcctacaaggccacacatgatctggctcccaatacctccgctgacttctcccacatgttctatgccctcaccgtctcagcaccagcaacactggcctccttgcttcctcaaatataccaggtgcactcctcacagtttttacactgctggtcccttggcctgcaatgcttttgctccagatatcagcttggctgtctccctcacctccttcagacacctcctcaactatctcctcaatgaggccttccctgacactgtcccctcatctctcattgtgacccactcctggtctctgccttttctcttccctgttctccttttccccatagtacttatcattatcatctaacatactgtatgtcttcacttttttaagaaaaaattacctttttctccactagaatataagcatgaggagagcaggaatttctgcctgtttagtttactactatagccctagcttctagaactatacttgagacatagacagcaatcaatacattctgtacttgctaaataaatgcatattgcatttctaaattatttaaacatattaatagacaagctcactgtcttgaattcataccttttaaacctttaacttatttttcaattcaatattaataaattaattatattctattttaaacggtaaattaatctttctgctcttagatgcatttcatttaccaatttacagatgtaactgcacatttataatggagcagcttccacatattgacctttgggaaaacctactttcatgacaagcaaacagaaaagacacttgcaattgctgttggaacactggcaagccaattagtgcttctttaatttgcaactgaatttatcataaattaatcttaaataataatcaatgacaaaatatgtctcaaaaaataaaaatagttccaatgtttggggatactagagggcataattgcttttgaggtgcaatttgctcttcctatgacattaaacgtagttagctcttttttttcctggcatcattaaaatctcatgatattcttctctgtatataacactgcaggactcactctccccaaattcaggtcctgttactttcattagacacttaactcgagattattcccacgacctaggcaattagacttcaaaccatctgccagactcagctcagctgcattctgatttgtgagtaaatacttgctagagacaaattctcatggagttcaatgcccattgcttgatgagctctttgaagagagtgccagagtcaacaaaacagagggaagccctccagcttgtagctttctatccatatggctacatccacaagtgatttcagatcccttcatcacccataacaactctttatattcttcttactcagaaaaaaaaaattactacatgttgacaggtttattttaggaaagaaggtacacactatttaaaaatcctggatttgaagtaaccaaataaagctttgggtgagtgggaaaaaatacatcctcaaataacttaaaatgattcctgacttattgagtttgaggatctcttcagactgagatttattctccgacaactccagaattgggagactatcaaatgtggctcagtactcaacaagtatttgttccaagctcttgcacagttctgtgtgctaaatacagtagtgattaaaagttaaagatgaagcattaaacctaagattttattttctctccctcctgagatccccttaaaaagatgagaaaggagtttttcctatttatacatccacaagaatttttactatgcatacattcacagaagacaggtcagagcccatccatggtctgaagagctacagaattcagaatgaagaaaaatagaaaagaaggaaggcaaaactcacagtactcagagggagcgtagtcagagactgctgccttgctctgtaaaatctctgggaggaataggacttagaggtgatgggtatggcatgtggtaagagtaagacatgggactgaaaacagaagggttaactgaaagtttatatctggaagcattaatcctgtactctatttatgcaaaattccaacagccaagtacctccctactaagctgaagaggttgagaaatcctaaaacaaaaaagacattcacattctggcactttagggtctaccaacataatggccagctccctacacaattaccctaaagcaaagtctgccaacagaaaagcaccctcttaaatatgaatgtgtgcaaccagagatctccagtcaaagaaagctcctaacatggaagatcaaaaccaagatacacaaatggcggggaaatgagcctggagaaatcaaagacatcacagaaaagagaaaggaacctttaacaaagcaataattaaggacctgagataaatctgagaacacattttatccctattactataacaatcatgataataataataaaaataagagctaatatttattgagaacacactaagagctactgttcaacaaactcaagacaaggaaactgcagcacacaaagtttaagtgactgatagtaagcacagaagccaggatttaagtccagatagtgtgaatttaaaacccatgttcctaaacaaaggggtatgcttcctcaaatatgctggttttattttattttttattatttatttttttttatttttagaaggagtttcgctcttgttgcccaggctggagtgcaatggcgcaatctcggctcaccacgacctccacttcccaggttcaagcgattttctcctgcctcagcctcccgagtagctgggattacaggcatgtgccaccatgcccggctaattttgaatttttagtagatactggtttctccatgttagtcaggctggtctcaaactcccaacctcaggtgatccacccgcctcggcctcccaaagtgctgcgattacagatgtgagccaccgcacccaaccaaatacgctgtttttaaaaggaacagaacacaggaaagtgctcttaaaaaatctattcaggtatttgacaagtatgtgtttagagtcttctgttggctaaacaccagtctaggtaccaaaaatacggcaataaacagaacaggcagtatttcagctctcatgaagctaaaattaaaaatttagtagaagagatggaagatgcactcaaggaattttaccaggcaatttaataaaagtaataggagaaaattccaagaaaaaatggagatatgtctgatggaccaggaggtgccttttcctcttattaagaattccagagacaaaacagataaaatgagaataagttatcccataaacaatacaagaaaatttcctagcggtgaagaacaaaggtcttcagattgaaggggcctgtcttcccccagtgcccattataataaatggaaaaagattcctatcaaggtacaccttcatgaaatgtcacaccagggataaagagaaggtctgagaagcttccagaagtaataacaagtcaatgaccaaagaataagaatttgaatggggtcatacttaccaaaagcatcactgcgtgctagaatatgataaagcctttaaaattctgaagaaaggcgatttgcaactttaaattttatagccagctaaagtaccaattgaatataagggtagaaaaaaataaggtcattttcagacatgcaaagactcagaaaatatctccttcacacggcctaagaaattacttgaaaatgtgctctaggagagaaaatcaagaaaaaaggtgacacaagattcagaaagagactcccactggggagaggggaaatagtctcctaagaagcttgaacttcattctgtagctattagaggaggcatggatttcaagctggaaagcaatataagatctgtgttttagaaaggacattctttcctaagtctttcctaatgtcctttagaaaaaacattctttcctaagttcctaaaatcagaatagtggaagatttctgagaccagtcacaaagtttttgcaaaactcaggtgaaatgcagttcagacctaaactaaggtggtagcaatgagaaccatgaaattgtagatgtgcaacagctgggctcacatctgatcggggtggggggttcttagcacaatttcatgttgttgtaaatattcacggcatgaacatagggcaagggcaagagagactccacaaggacatcgaagcttcaagccctggaaagtggtagatggaagacaagaaataaagacattccagtaagcttcaaggcaagaatcattctatttgagatattttgagtggagaggcagttgctagatccataaagaagtacagaggagctcctacctttctgtctgatagcaaccagactgtctgattaaaactgcagatcactgcaagggtggttaaatcaaaaaagaaaaaaggcagttgttccccctgcttgaccctgaaagtgcagagatagtgtgggtggagtgcacaggaacacttaaggtgcagcatgcctaatggatacttagaacgatgacaagtgaggactaagatgtcttcaagtataatagattctaattttgtctgtaagtggccttagagctctgagatgagactacagaggtagtccagtgctagatctgcaagaccttaaagggcatggtaggaagcgtggatgttattcacggtacgttgagaagtcactgtaggcctttaggcaggaaagtgacattactcaattcatatgttatgattactctggctactatgtgaggaatggattgaaaaagaataaaagtggacaggaaagatatttcagtaagagataatgttagcttggactagaaagcttacactggagatgcaaatacatggatttgagattcctttggagttcagaatcataggtgttttgcaagattaaatgtggatgggacaatggtcttgaggaaatccaacatgttgtagtgattccaaggttactaatttgagcaatcaagtggatgagagtgtcaattaccatgttggggggaaatagaggaggagcaggttgagctaagggcaaaggatgaaaagataagttttgaaaggccctattaagttggagatgcctgtgaggcatccaggtggagatatcaaataagcagttggatatacaagttgaggtctggactggagctgtatttgccaacttcattgcttttggcttcagctcagataaacttcaaattgggacaaggaggaaattaacaattattgagcacctaccatatgccaagcacccacatttcccaacatctactttctccttgcctgcccaagcacccttccagttcagcccgagtgggacctaacttagaggccacctgggatacgtcattacatatactcagacaaactttggaatcaaatcttccctcccagattcctaatgagtccatggagagttactgcacctggatctgtgttcaaagactccaaagacctgaaagtgaagactagctcctgggacactgaagctgagaactccagacccaaatgatacttatgactccacccttggttcactgtatctttttggacacaacatcccttatttctttgtctgaattttagtatctgcccgcttcataaaaatgctttgagaattgaaaccagcttctgaatcacctggagagcatcctaaataatgcagattcccaggctccacaaacagagattataattcatttggtctggaatgtgtctcaatctgtattacaggtgattctgatgctggtccagagtgatccctggactagaaatgctgatttgcagagtgataaactgccagtttttccccaaattatctgcctcaatgctgtctccatcacttagaacattagggcagttttaaaagaaggcaccgaattctttgacactcttcccattaagaggtggactgtatgtcctctgcccttgaatttgatagttctcttagaatctggctgacataatgtgggaaggtcaagccacatggagtagccacagcaacagtcccagctgagctcagtctttgagtcacctcagccctggcaccagacatgccagtgaaggaaattgcagataatcccaacccccaggcattgagtcatcccagactccagatcttcccagctgacgccccagacatcacagaacagagacaacctatccccaccattccctgttcaaattaatgatccataaaacctatgctcataataaaaagattgttgctgtatgccacttagttttggggtgttttgtcacgcagtaactgaaataattactaacatgttttctcaagaaatatgtattaaaatgcaagcacattacttggatgaactctttcagatgaacacacacaatcagtgtatctagcagacaacaaagcagggaaatgagccatgagatgctctcccgtttcactgacgtgaaagcatcgctgggaaaggcaacctaagatgcttccagaaagctggaattgaaagatggccacaccttgaagacagcatggctaaaagagaaagacatgcctcaaaaaggacggatgaggccagagagcaaacccagattcattttcttcacaactgtgcttaagtctggctcaaaagtccctccactctctcactaaccacaaaggtgtttatttatgccagtttataaatgtctaatgttaaaaatcacctgggaataatacaggaacaagcgccaagggtaattttttttttttttttttgagacagagtctcactttgtcacccaggctggagtacaatggcgtggtctcagctcactgcaacttccgcctcccgggttgaagtgattctcccgcctcagcctcctgagtagctgggactacaggcacgtgccaccatacccggctaatttttgtatttttagtagagatggggtttcactatgttggccatgctggtcttgaactcctgacctcgtgatccgcccgcctcagcctaccaaagtgctgggattacaggcgtgagctaccgcacccagcagcaccaagggtaattcttaccagcaggccagtttggaaaatgctagattatatatttttttaattaaatacaaaacaaaatagcaaccgcaccaaccctttcctcacaagagtcacagtcctgtggtgagaatggggttaatacatgagctttacgttctgacggccttgaaccttgagaatgtaaaccccagctaagtccaattacaatgatgtggggggaggaaatggaaaataatggaattcactagctaattggatactattaattatattaaatattttaaatggaattatcttctatgaggaatattttaattgacaaaatataaaataggagggatattaggttaaatattcatggccttattcaagctattaatggtgccaataaaaatgatggagcaagacatggaacctggactccctgggattcagaaaagagcagagaatgccacactaatgccacgaattcattctattttagtaactaacactgatgtctacactgttcccagcctgaccaccacccccctcaccccattgttctcggaagtgatttgaatctgatttcacattgttaatatcaacacttgagttttctttccaagaaccgatttacagtcttctaaagacactggagtggcgggggagggggggaaatgttgtcagtcatgaattcccaatgtaactggttatgactctgaggtctgcatcattatcagattttcatgatactgatgttgattcatatcagtgagcagtttatcagtccccaaactctagtccccacagcagctgatagcaaggtaggccccttcgtctctattctactttatttctcttgcctcttgagaccctttcatagtcacatggtggcatgttgcagagtaaaattgacatctctctctgattccaagagtttgcatgtattgtgatggatagactaaaatgactgtggaaatagcatttgtagtactggatactggaattccaaggagttcctgtaacacagacttagaagcctaatatccatccctccttagaccagaagctcagcttatgtactcagtagaagaaaggagcatatcatctcccaattaacctcaggcctgtttgagtttctggccaaggctgagaaggccctggctgctcactgcctctctgcatttttctgttctctgcctcccagggacgtgtctcaaaccagtgtcactgcccttccatccaaaggcctggagcacctgaaggaactgatagcaagaaacacctggactcttaagaaacttccactttccttgagtttccttcacctcacacgggctgacctttcttacccaagccactgctgtgcttttaagaatcagaagaaaatcagagggtaagtggcagggacccggcataagtgacaaaagaccttggtggaagtggaattcatttcttggttttggggaagatgcttcctggtttgaaaaccaggtggagaggaaattggaagcatccatatgaaacaggaaatccatgggacacagtgaccctgaggacccaaagtgggtgcagctgagaaataaggcaaatgttgctggatagctgtagagcagaggaggtgacagatggcacaggagagagaaacacaaccagatctcatagaatcttgtagaggttatgtagacatgatgtccggtttccaggtacaattcagaattagatactgcaacacatatcagaccccagacaccacaaccatgagaacagacttataaacaacacaaacagttgggttacctgactggtttgggccttgcaagtgtcatagctccctggttacatgcctgcaggctttggagtcagctgggtttataccgcagctctgccatttttcaagctgtgttatcccagcctagttacttaaccactctgagtccttgggagtggagatcctaatactatcattcatagcagttttgagaagattaaatgagaaactgaatggaaaacactggaatggaatggcctggaatattataagatcttcattaatattaactatgatatacagtatgtgcacatcaggctgcttatgagcctgcgaaggaggaattgccttcattttctctccaggctttctctgattcttttacttttttgcttttactctgcattatttcccccattgtgtcttgtacaatctcctgttctcctaatccaccttcatcatctctattcagtcctcctcagcttctatgtatttactgattgacttactacacacataattgcagtcaggaaaatatcagatctaggtgtgagggcagaagctaaaacagccatacaaagaaggccaatatggtggccgggcacggtggctcacgcctgtaatcccagcactttgggaggctgaggcagccagatcatctgaggtcaggagttcgagaccggccaggccaacatggtgaaaccccgtctctactaaaaatacaaaaaaacaaaattagccggatgtggtggtgggttcctgtaatcccagctactggggaggctgaggcagaagaattgcttgaacccggtaggcggaggttgcagtgagctgagatcatgccagtgcactccagcctgggcaacaaagcaagattctgagattccatcacacacacacacacacgcatgcgcacacacacaaagaaggccaatatgggcatcatagctgcaaaaagccagcagtagggtagaggatggtgatagtggactctacactgatgccatgcagcattgagaaggactggacaagggctgggtgggaggcttaagtggacctcaggggcagggtctagacttcttagcctccagttgagaagagcaagtccattggacattttaaccagaacccaagagatcactcaaaatctgctcagcagctgaggcaagttaaagaatcccttttgttgtgagtctggtgagcaaggaaaaaactaaatcttatttccacaagcatgcctgtatggtagtgtccatttgttcatttgttaaacagatatttactgagcaccttctatgtgcctggctgttgtaaatagaacagacaagaattccctcttgtattttgcttactgtctaatggaggaagtcagaaaataaacaggctggccgggggcagtggctcacttctgtaatcctagcactttgggaggccgaggtgggcggatcacttgaggtcaggagttcaagcctcgcctggccaacatggtgaaaccctgtatctactaaaaatacataaattttttatttttaaaatattcagtttgaaactaaataatgatgagtagaggcagccatgggtttttcaggcaatgggaacatagggttttagagctttgaataggaataataataacaataaccaccatatggcactcacaaagctacaggtgctattgtaagagccttaaaaagataaattcattgaatcctttaataaccctatatgaaatagtcactcccattgtcccatgttacaaatgagttaaccaaacttcatgggcctacccaagctagtcaataatagagccaggttcccaccaaggcgactggctccagcatccacatttttttttttaaacagagtctcactctgtcgccactcagcctggaatgcagtggtgcaatcttgactcactgcaacctccacctcccaggtttaagcaattctcctgcctcagcctcccaagtagctggaattacaggcacgtgccactacgcccggctaatttttgtattttcagtagagatggggtttcaccatgttggccaggctggttcgagctcctgacctcaagtgatttgcctgcctcggcctcccaaagtgctgggattgagtcaccgcaggtgtgagcttttttttttttaatcactgttcttgaagtggttgcagaagagaaataagaccaatgccactggagcacagtaggggaggggaggtcataggaatgatgtcacagaaacaggcctgcctggatcctgtagaaccttatagaattatgtacatcacagtaagtagtttgcgcattttcgtaaatgtgggaaccattcgtgggttttaagcaaccattcttttttttttttttttttttttttttaagacagggtctcactctgtcatccaggctagagtatagtggcctgatctcgcctcactgcagctttgacctccccaggctcaggtgattttcccacctcagcctcccgagtagctacgaccacaggcacataccaccatgcccagccaatgtttgcattttttatagagatgggatttcaccatgttgcccaggctggtctcaaactcctaggctcaagcaatccacctgccttggcctcccaaagtgctgggattacagttatgagccaccgcgcccagcctggcactgactcttttctgttgccttgcagaatccttgagtccttgatgtgtaatgagagcagtatgcagagcttgcgccagagaaaatctgtgaatgccttgaatagccccctccaccaggaatatgaagagaatctgggtgacagcattgttgggtacaaggaaaagtccaagttccaggatactcgtaacaacgctcattattacatcttctttgaagaacaagaggatgagatcattggttttggccaagagctcaaaaacccccatgaagagactctacaagcttttgacagccattatgactacaccgtgtgtggggacagtgaagacatggtgtgtacccccaagtccgatgagttcaacccgtgtgaagacataatgggctacaagttcctgagaattgtggtgtggttcgttagtctgctggctctcctgggcaatgtctttgtcctgcttattctcctcaccagccactacaaactgaatgtcccccgctttctcatgtgcaacctggcctttgcggatttctgcatggggatgtacctgctcctcatcgcctctgtagacctctacactcactctgagtactacaaccatgccatcgactggcagacaggccctgggtgcaacacggctggtttcttcactgtctttgcgagcgagttatcggtgtatacactgacggtcatcaccctggagcgctggtatgccatcaccttcgccatgcgcctggaccggaagatccgcctcaggcacgcatgtgccatcatggttgggggctgggtttgctgcttccttctcgccctgcttcctttggtgggaataagtagctatgccaaagtcagtatctgcctgcccatggacaccgagacccctcttgctctggcatatattgtttttgttctgacgctcaacatagttgccttcgtcatcgtctgctgctgttatgtgaagatctacatcacagtccgaaatccgcagtacaacccaggggacaaagataccaaaattgccaagaggatggctgtgttgatcttcaccgacttcatgtgcatggccccaatctcattctatgctctgtcagcaattctgaacaagcctctcatcactgttagcaactccaaaatcttgctggtactcttctatccacttaactcctgtgccaatccattcctctatgctattttcaccaaggccttccagagggatgtgttcatcctactcagcaagtttggcatctgtaaacgccaggctcaggcataccgggggcagagggttcctccaaagaacagcactgatattcaggttcaaaaggttacccacgacatgaggcagggtctccacaacatgcaagatgtctatgaactgcttgaaaactcccatctaaccccaaagaagcaaggccaaatctcagaagagtatatgcaaacggttttgtaagttaacactacactactcacaatggtaggggaacttacaaaataatagtttcttgaatatgcattccaatcccatgacacccccaacacatagctgccctcactcttgtgcaggcgatgtttcaatgtttcatggggcaagagtttatctctggagagtgattagtattaacctaatcattgcccccaagaaggaagttaggctaccagcatatttgaatgccaggtgaaatcaaaataatctatactatctagaagactttcttgatgccaagtccagagatgtcattgtgtaggatgttcagtaaatattaactgagctatgtcaatatagagcttctcagttttgtataacatttcatactaaagattcagcaaatggaaaatgcaattaatttggttggtgaccacaagataaaatcagtcccacattggctcagttcaactagatgttccctgatacaaagagaacttgatttccttaaaactgaaaagccaaacacagctagctgtcgtacaagaaacagctattatgagacatgaaggagggtaagaattagctttaagttttgttttgctttgttttgttttttaactcaacctattaatcatctcttcacaagaatccacctgatgtgaccaagctattatgtgttgcctggaaaaactggcaagatttcagcttatgtggcctagcaaactaagaattgctcttcttggccagcctcatagcataaaagatgtgaactctaggaagtctttctgagtagcaataagtgggaattatgggcagagcacactcaatcccctgttgattaataaaactggctggacactaattaactatgggacttaaatctgtagaaatgaaggagtccaatggcttcttccaattttaaaactctagtacatccctttccctcaaatatatatttctaagataaagagaaagaagagcactaagtaagtagaatctgtttttcctattttgtagggctgctaactcctagtccttgaagcctagacatatgacccaggaaatttttcctttgtttcacttttgattatgatgtctgagccaaaaattcaattaagtaaacatactcgcctggatctgaatcattcatttaattactagatctacccagctgtaattatcaggccaaaaacagattcatgtttatataaaagagtaaacgatggttgcaaattttggctatttagagttgctacttcactatgaagagtcacttcaaaacacttcgcttgtctttagggatgatttttgccatttccagcccacagtatgatactaaagctgtcaagagaggtttcttcttttctgaaactgccagctctttccagccctgttgatcactggacataaaacttcttttccccaataattcttctttacttaaaatagtcaggatctttatctacagatgtactctccaggttacctgtgatgatagccccctaatgtcctgctagaaaagtctccaagcagagatgacattacttctgaatgctcataaaccacaccatgaaataaaagctctttgttgttttaagattgtggagtgtggttaatgggtccccacagatggttcctgctggactcacctggaatctctccacagccatacccgctcatcactatcattgagacctgcacatcttaatagaaatattataaacatcgaaaatcatgacttacctagaagttcgcttgtaactaatgaaattaaacaaatgtgttgccttttgtcatgtgtttctctcctgtgacattttgaaatatcacatcttgataaataatgtgtttcatcttgaatagctgaactaatgctttggaaacagagtcctagaaaagtgacttcaacagaattgttactaaaatttgcactcacaacatgaaataaattttcttcctatggaataatcgtg

SEQ ID NO: 84 - DNA, 176071 bp, Human
cggggccagggcagcgcggactcgcgtcccgtggagcgttccaggcgggcgcgcggctttctccccagacccaccgagtggcggcggaggcgagatgcgcgggggcgtgctcctggtcttgctgctgtgtgtcgccgcgcagtgccggcagagaggtgagcccggcccgggtcctagggtccctgtcccccgcaggcgggcgggcgggggcggccgcggacaaagcccgtcgcgttggggctgctggagtccgggcgcgcatcctgatccacctcggagtgggtgtctcggccacgtgggtctcccgcgcttgccggggagggctggatggggacgccgctcctgccggacgctgcccgctctttgcaggcttaggctttaacctcctcgggctttggggttaaagcccagcctcgcctctggcttttgcgggacttcgcgacccaggagcgccatctacgcgagcagtgctgggggtggcgggagcggggcgcccggagcggggcgccgggggttgcttttagtgccccggctgcgcgggcgggggtggcggggctgttggccgggcgcgggggatgaatggagaaagagctctcccgagtcgccctcattgtccggctgcgcaagctgggtcgcggcggccgggaaagggcggattcctcggggcccctggcagccaagcgggctagtggggagagacgcggcgagaagggcgcccctagccagccgtcccgggcagggggacccgcaggcggcgtccagggcactgatgcgccttcccgacccgcgctttttgtgcaataggcgaagtggccaaacccgctcattcactgcgcgggattgaccgtgggcgcgccggggcgagggaccagcggagaagggagcaccttgcatgcgcgttgcaaggattgagaagagaaactcagagcgaattttcattttctgtttttgcgggcgggcggaaagagagagagagagaagaaagaaagagagagagaaagagaaaagaaagagagagaaagaaagaaaaagaaagaaagaattcttttcccttttgggggacaaccctagtcacccacgccacccctagagctgtcttcgcagcgtggcttcgtgttggctaggcagtcacaaatatttgttgaaaacatcttaatgtatgcagcacatgacaatgggcgtattcccacgaatataaacttcattaaaaaaaaattcgagtcaaaagtagtgggcggaatttgcagtgccctcgtgggaaacgtgtgtttgggcattgtgctgagttgtgagctctgcagaaacgcgaccatctcattcattcaagcattcatgatggaagcactggaccggagctggaaacgcagcattgaatagctgcgagtctgctgcgcagagccaggctgggaagagggaatttacatagttatcagccagaagaaaggagcctttggggagggagaggagccttaaaggattgcgaggggactcctgtctatcaggctgctgaaggtgaacaagtcccggtttcccacagggtagagaaagagcagcttgcctcagcttattgttccccgaaattgaaagtcttagactgaggagatggcctgaaggttgtcctggcccctcggggctcggcacttggcctggcggttatgagtggtttttggagaaagtgggacctcatggggctttcctgctttgagatgctgcggaaaacctcccagggcaggagccctttaatgtttcatatcgcattccctgtttgcctttttgccttccgcaccccaccaaccctcacccttcctaactagcctccttgagcagttttgattttttttttttgcagtctccgggctgcaggcaggagtggagtggcaccatctcggctcactgcgacctccgcctcccgggttcaaacaattctgcctcagcctcccgagtagctgggactacaggcgcgtgccaccacgcccggctatttttttttttttttttttgtatttttagtggagacagggtttcaccatattggccaggctggtctcaaactcctgacctcgtgatcagcccacctcggcctcccaaagtgctgggtttgcaggcgtgagccgccgcgcccggcctgattttttttttttttttaagaaacgattttgtgccccatgaatagcatgaatgatttgtaaagttgtgtgttttggtcaataatcctgacctgcaaatcacctgctagttagttgtctggtgttattttttaaaataacttattatctattgacattcagattgttagacgttccctgtcatttctgcagtctctctgggttaccttacagctcatagtatatgacctgatggctcactttcctttgaaatttaatgagtttcaagtgagctcctcctaagtattgaataggacgtattgtgtttgtaaaaataatgtgttaaattcatagctggcaatcacataaaattatggttgcttcatcacttttgttggaaactatcccttctttttttctaaaatagacaattctaaggacagaaaaaaatctacaagaaaattcacttcattctcatatatgacatagtattcaaatttagcaagtatgtgctccacagtaaagtatgcatgcctgaatggatttcagaggtgcgttttttcttttctgtcactgtattctctaagggcccatgaaaaatattgatcgtagcagttggaaacaagggtatgtgtaacagaagcctcactgcccacctcctacatagcctggactttagtccattctttttttccttcttcttttccagacattaaatatgaagcctacatctgtagttaatctagcatgattgagaattcaaatgcatcaagaatattagaataaatacatatactgatctttagtgtcttgtgccactgctttataattgcactgctttataaactcatataaaatgcttctgggaccatttatttcagggtaatgatccttgaaatgccctaccattttatactaattcattcataaaatcctatggatattcattttcatgtacagtaaattgttatggggaaataacacaaggtctgtctttaagcttcaggtgtttaattctctggctttactagctatggcaaattggggacataacgtgtgttttagtttcactgtctgtaaaatgggaataataatagtgcctacctgaaagggatgttaatgattaaatgaaataatgtgagaaaagttgttagaccagtatctagtacagagttaaccctcaacaagcaagtttatttatgttcatcactgttactattttataaagaactatatatttttaaactatattctccaaaatgcataattgtttagaaatttgaagtctggatttggaatcaaatagtcttgggctcaaatgccagacctgtcactttaattagctatggccatggctaagtttcttaacttctctgaatgtcagctttctatctataaaatggatagcattgatactattaaataatatgtgaaaaatattagcacagtgtagggtgtgtcataggtactcagtgcatgatggttattactgttacacctattgtacttgctcatcatcctggacatcatctctctttcattgctgaaatccatttggtcattgagacttattgattttacctcctgaaaatctgtgtagtctctttcccttttttcttttttttttttttttgagacggagtctcgctctgtcgcccaggctggagtgcagtggcacgatctcggctcactgcaagctccgcctcccaggttcacgccattctcctgcctcagcctcctgagtagctgggactacaggcgcccgccaccacgcccagctaattttttgtattctttagtagagacggggtttcaccatgttagccaggatggtctcgatctcatgacctggtgatccacccacctcggcctcccaaagtgttggtattacaggagtgagccactgcccccggcctctttcccattttttattctcactgctggctagacttaggaattgtttgtttttctcaggttgtttgtttttctcaggaaatagtgtgatggttcactcagcaggccagcagcctcacctgttctccctcctcagcagtgccatcactgtgatgtttctagaaacaccatctcgataaccgctcctactcttgtttaaaattcttcccatttctcaccgtttctttatcaaattacttaatgttccccaatgtgacttactttccttcatgtttaagcaagtggtcttcttccaaggtgtgcccttttcactccacatccttctccagggcccaccctataagtttagattatgtgccccaaacccctcactttataagatgcacaaaatgacagtgtcctgctgtgtcacattgggggtaaagcaaggaggctgggaccccagctggcctgctgtctcagagctgagaggcattatctgggatacgcctgcacctatttgtagctaactaatgtttcctggcacatgggctcttaagtgccggacacatctttcatttgggttctaaagaaccctggaaaatcttcccagctctctctctgctgaagtatttgttagacaaccttccctgtactcacagggctttccctgctcaatgctattgtcttgcctgtcatggggccaatgacttatctggctcaccttctctctcggccttgtcaagggcagggactgttttatgcatatctgttcattgctttgcagtgtttctagcagttagtagccacttcttgttgttgagctaagttgaaatgaacatctttatttaggaatcaagtaactttaaaaatattttgaatagctgggcgcagtggctcacgcctgtaatcccagcactttgggaggccgaggcaggtgggtcacatgaggtcgggagttcaagaccagactgaccaacatggagaaaccccatctctaccaaaaatacaaaattagccaggcgtggtggtggggcctgtaatcccagctactcaggaggctgaggcaggagaattgcttgaaccctggaggcggaagttgtggtgagccgagatcgtgccattgcattccagcctgggcaacaagagtgaaactctgtctcaaaaaaaaaaaatgtatatatatatataaaatacatatatgtgtgtatatatatatattttaatagataatccacatttatggtatgaaatgcaaaaggtactataggtagaaaaaagttaagacttggcttttttactctcttttgaggtaaccactggctttaattttttggataagcgtctaaagatgtttcttcaggtaacttttaaaagcaagctacatcataaaatctacttcttccctattagtgtaagagggacaccagtgattttctgccaaaacatggatgcatggaacagtatccctctgtccactgtcctcccctcatactaacttctttactggaccttgtgctggatattaacacatcatttagtaaatgtatgtacttgcaaacttttcaccttgcaacttgtccttccaagtagggctttgacagaaaggtattgttagagcagtgtttcctagatcttttggggtttaaaaacttgattgatttcatggcattgtactacttctaaaagtattgtttactatagtattaataagctatttttaagccatagagaattttaaaaaatatattttagaattttaagatttatgatatagagaagttgagtttgagaacaattctattacacgttaaggataagttaatgtattgaccaataagtatgacttattactggaacactatggcaggtacagaaaatatgtatttaaaaaaatttctaatgaagaagttaagtctacaccttgaatacagaaattaattgatagcgactggacagaactgtggaacttagaccttagctgaagtttttcgttacattcttcagaaatatttggatgaactagataaactatcatctcctaagaatgatgtatgtagttacttacaagtttgcaaataattcttttacttgttttatttctaaaatatcaatatgcatccatggacaattgaataaaccaaggcattgcaaaattaacgaggaggaaaaacccttcatagaagtaatttagttaaggtcatgaactttggttctgttggaacacgtctgtcagggagctatttcagcataaaacgccacacgatagctggattcattgtattttcatgtcctttatactgggtgtgacagtgcccagagtaaccatttgataataaatagcacagaatcttcccacttgtgtctttgttttctcaaggctggctcaggagagctttctttgggttaacttgttcctcatcttgcttgggggcaggaggcagacaatggaggcagagagattccaaatcagcttgggtagataacattcttgcctaggtaagcatttatctcgaagtgttaattcagaaatggtggcagagaaataccactgtgaaatcaccagtgtgacttcagtgtgcgtgcacattttttttttaatcaaccatttgaagtttgaatctcttcattccagaagttatctttgaagtctgatctgctggcccagcaggcagtatgactgacattcttgtgccagagaacctcctgtattgctggtgggaatgtcaaatttagatcaatgagtatttatggaaagtgccatcttttctcattcccgaaagtatttcctgcatcttgttccattgctccatagtttcctgccagaacttcaggagattctctatgacaatagcagtgttaaagaagatgcttaaatttagcagatgatttttagttaaaagagaacaattagaagtggggggggggagggaaaaaaaaccctcacaccacagttgattatggtacaccatacttttttctttgttttttcctttgacatggagtctcactctgttgcccaggctggcgtgcagtggctcaatgtctgctgactgcaacctccgcctcccagttcaagcgattctcctgcctcagcctcctgagtagctgggattataggcgcccaccaccatgccaggctaatttttatatttttagtagatatggggttttgccgtgttggccaggctggtctcgaactcctgatctcaagtgatccgcctgccttagcctctcaaagtgctgagattacaggaatgagccaccatgtccagcctacaccacacatttaaatgtcttccaaccttttggtaatgacagaattttacccacaacaagtggaatcttgttatctccagctcaggacaaggaattcgttctttctccagatggctgccctccctgtttctcctgttcttggcattcttttggttacctaggcttcatttccttttctgtttttctttttctgtatccccttatccaaattgtctctcttaattttgtttctttccttgaaaaacttcctgatctttttgttttagtttctctctgttagcactgcaaatgccaccagcctctaaaccagctgctatagtgtaactagccgcttttttttttttggcagcgggtggggggatggagtcttgctctgtcacccaggctggagtgcagtagcgtgatctcggctcactgaaacctctgcctcctgggttcaagcgattcttctgcctcagcctcccgagtagctgggatcacaggtgcgcgccactacaccctgctaatttttgtattttagtagaaacagggttttatcatgttggccaggatggtctcgatctcctgaccttgtgatccacccgccttggcctcccaaagtgctgggattacaggcgtgagccaccgcacccggccagccggctgctttttatcgggtctgtgatgctagctcgtgtcctttcatttaatccagtcccacactgcagttagagtaaccccgccaaaataccgccttcgtaatgttctccctctgctcctgcccacctgctatggccctcagtgatccctccaagttcagtcaccccgcccttctccacacctttctgtagctgaactattagcttccattgcaggggtctccttcctgtctaactgcacgtggtatattgacttgcagctgtgtgatttggttacatgactctctcacctgaaatgtactcccgtttcccactgaaaacctaaccagaccactcatgcacaggctgcaatataccaaccccaggacagcctcgatgtgatggcctgtttcaactgtctcacttctgaatctgcattgtattttgtgataaattggagttcccacccagccaaagttgccatccggtcctcttttgaatggctggtccagaatgacatgagccagtgtcaaaaagaagggacatttctgtttcgaagatcaaaaccttagctcccggcatttctttgaatacacagacaaccccaggggggttctagcattaaaacctgggtcattagtagccggagggcagtaacaccgaggaactccccacaggtagtcaggttgcctgagcaaccataaagccggtccccggactctggataacaaacccagccctggcacctctctgggtatgtggtccttcagcctcttagactttgtatcatccaatcaaatggattgcagttgatttgatctgggtaggaaccaaaatctgtgtttcaaaaaaccttttcccattttgtatccagaggcacaagaacctttccagttggtcttcaagcagaccctttgggtttctggttcaaatagttgtttccagaactcttcctgccactgcttgctttctgtccttgctgctgtgtcctgtgatgggctagcactctttccccacccgtcaaaatccacagtttgtctcttcagcccttttatctgaatctccaactctgccatttttacctttgcttttgtacaaactaagtttttccaactctttgcaacttcacccctggcttcatgggcatacttttgttcattctagaagtttggagtggggagaactggagataatgcatccacatatgaatgcttttggaagctcccagtgtttttctttaaaagggagttagctttttttttttttttttttttttttttgagacagagtctgtctcagtgcagtggcatggtctcggctcactgcaacctctgccttccgggttcaagcaattctcttgcctcagcctcctgagtagctgggaatggcctgccaccacacccagctaatttttgtatttttagtagagacagggtttcaccatgttggcggggctggtcttgaactcctgacctcaagtgatctgcctgcctcagcctcccaaagtgctgggattacaggtatgagccaccatgcctagctgggagttagcattttatttttatatttatttttttgagacagagtctcgctctgttgcctaggctgaagtggtggagtgcagtggtgccatctcggctcacagaaacctctgcctcccaggttcaagtgattctcctgcctcagcctcttgagtagctgggactacaggcacacaccgccatgcctggctaatttttgtatttttagtagagacggagtttcactatgttggtcagggttgtctcgaactcctgacctcgtgatccacctgccttggcctcccaaagtgctgggattagaggtgtgagccaccgagagagttagcattttttcttttctttttttttttgttattttttttatttgagacggagtctcgctctgtcgcccaggctggagtgcagtggcgcgatcttggctcactgcaagctctgcctcccagattcacgccattctcctgcctcagcctccagagtagctgggactacaggcacccgccaccaggcccggctaattttttgtatttttagtagagacggggtttcaccatggtagccaggacggtctcaatctcctgacctcgtgatctgcccgcctcagcctcccaaagtgctgggattacaggtgtgagccactgagaaagtattttagagttaacacctcattggagaggagaatagtatttccttataggagtattgtcatttctattcagtttttaaattttttttcatgcacttgatcattcatttattcactcattcatccatgcactgaagacactttgggacctccactcctccaggccctgggtcaaggatgttcaaaggtagtgtgtctggagagccctgttctcggctgccttcctcactgtgaatccaggacacttcttggcattcttagtgtatttgtttttgaagtccaaggaactgaaaagtgcatatatcaaaaggagttttctggctgggggcggtggctcacgcctgtaatctcagcactttgggaggcggaggcgggtggatcacgaggtcaggagatggagaccatcctggctaacacagtgaaactccgtctccactaaaaatacaaaaaattagccgggcgtggtggcgggtgcctgtagtcctagctactcaggaggcagaggcaggagaatggcgtgaacccggcaggcggagcttgcagtgagccaggatcacgccactgcacttcagcctgggtgacagagtgagactccgtctcaaaaaaaaaaaaaaaggagttttctccataagaaatgatgatcaagtaaggagttaaagtcataggagtggacattgccatctacgttctgcttgctcatattcatgtaagttaggggtgaaatgagtagtccaggtcatgggtcgaggaaagcgggggaggaggggcagaggcgtgcagcactggctggctgctttattggaggtgcggggtcagcttctacatcatatgccactgttggtgggtggtggctgtttcccttaggcttcctttcttccatggagaactcagagtcacctgcttggccagcacttctgtgtgtgtcagaagagcagactcaaacagtgacacagaagttccctctgtgggctgcacattaaatttcaataatatcaatacccaggtcttactcccagggattatagtgtgtccggtctggggtgggggtcatatcatttgcattttaaaaatgcttctggccgggcgcggtggctcacgcctgtaatcccagcactttgggaggggccaaggcgggtggatcacgaggtcaagagctcgaaaccatcatgaccaacatggtgaaaccccgaatctactaaaaatacaaaaattagctgggagtggtggtgcacacctgtagtccgagctacttgggaggctgaggcaggagaatcacttgaacccaggaggtggaggttgtagtgagctgagattacgccactgcactccagcctggcgacagagtgagactctgtctcaaaaaaaaaaaaaaaatgcttcccaggtgattccactgtgcagccagggttgagaaccactcagttaacatcataaactttgtaggtgaatgcagtttacacagcaatgcaaggaggcaggatctgccaccatccctcgctttgtctgtagggtgcaagttggggcattgatcccgtcctgcccaccgcagcccacagactagtgctctgtacataacagatgtggaatactcgggtcccaactgactctcctcatttcatgtctattttctgatattcccacagctctgtgaagtggggataacaacacccacacatctcagagctgtgagtaatccctgcacttagagaccacgttggatcagtgaagtggctcagggaaagccagtttcttctgtgtccccattgtcccttgtgtaatgttttttacttggaaagttctcacctgatggttcattgttgcacttgtgtttaaatgggtttccccacagtttagtcttgctttgctgacttggtcattcgccaagacccttctttgaaaaatactcttgatcatgtatgacatttagagtcctcaagttttgggataaagtctggtgttgcagaattgggtgttgattgatctggtgttgcactgaattgttcattctttaacgaattcatccaaaatttaaaaagtgtcctccatattcaggcattattctgtgccgcatcccttctttctcaatgcctttaaatggacaggtcacaggagccttttctttgggattatctgggccacccccttcttcccttatacaacctgctgatctcctcttgcaccttctcatgtctggcgactccagggtctagctgtctttattcacctactgctcctgtcctcttctgctcttgtttgtttatttatttatttatttatttatttatttatttattttttgagatgaagtctcactctgtcgccgaggctcgagtgcagaggtgcgatctcagctcactgcaacctccgcctcccgggttcaagcaattctgccacctcagcctcccaagtagctggattacaagcaccagccatcatgcctggctaatttttgtatttttgtagagatgaggtttcaccatgttggccaggctggtcttgagaactcctgacctcaggtgatccacctgcctcggcctcttgaagtgctgggcttacaggtgtgagccactgcgcctggtctgctcttatctttaataattgataattcattatgcacttgcttttctggcctccttcagaagttttcctcaatatttggcttattatttctcttccacccaacaaaacgagccattttcctttccatatccctgtcacactcagacatacatgcacacacacaccccttacacatctgcctatattgacttacagaccagctgcctacctggcttccctgctacaggcacttggggaggtatcgcactgaacccaaccgagcagagccagaacctgggcctgggcccgtctgcagggtagagcaggttcttctggaagggccagtccagctgcaagtgctgggatgaagtccaatgtagcatgtaatgtaacagttttccaagagcccagaaagctgttgacattggaagttccctctgagttaatggactgtgaggttgaccgtgtcatgccatccctgttgaattgcttcaatggcatctcattctctattgagtgggacttctaaggccctgtgtggtctgaccctgcccagacctctccacagcctcttctcccactgctaaccacatctcgaccattctgtgatatctgtagttccatcacgggagcttcatttcacctatggcactctgacggactccagcccaccctgtcatccttcttattgtttccatagcgatttctttgtacatctgaccagtacaccatttttcacctatttgttgacttgcctgtctctccttaagggccgagagttttgcctatatttgttatgcctagcacagtgcctgacatacaatgtagattctgtaaatatttgttgagtgaacaaatcccaatacagacaagcaatggaaatctgttaatagtaggtattggctggacgcggtggctcacgcctgtaatcccagcgctttgggaggccgaggtgggtggatcatgaggtcaggagttcaagaccagcctggcccacatggtgaaaccctgtctctactaaaattacaaaaatcagccaagcgtggtggcggtcgcctgtaatcccagctactcaggaagctgaggcagagaattgcttgaacctaggaggcggaggttgcagtgagctgacatggtgccactgcactccagcctggcaacagagtgagactccatctcaaaacaaaaacaaacaaacaaaaataatgggtattatttagagaccagacagacggacagaggggttagggcagtaactagtgaggaagcagagcgaagatccgctggggaggggcaggggctggctccagaaggctaggagacctcagtgggtcacccaggcaggatttttttttttttaagacggagtcttactctgtcacccaggctggagtgcagtggcacaatctcggctcaatgcaacctccacctcctgggtttaagcgattcttctgcctcagcctccctagtagctgggactacaggcacccaccaccatgcctggctagtttttttttggtatttttagtagtgatggggtttcaccatgttggccagactggtctggaactcctgacctcaggtgatccaccacccatctatctcggcctcccaaagtgctaggattacaggcgtgagccaccacaccaggcctcaggcaggatttaaaggtggaacaaggaagaatccaggtaaccagactaagaaagagaatggatagaacttttggaaccaaggcctctgctcacattattttttttattttttatttttgagatggagtctcgctctgtcacccaggctggagtgcagtggagcgatctcagctcactgcaagctccgcctcctgggttcacaccattctcctgcctcagcctcccgagtagctgggactacaggcgcccgccaccatgcccggctaattttttgtatttttagttcaccatgttagccgtgatggtcttgatctcctgacctcgtgatccgcctgcctcggcctcccaaagtggtgggattacaggcgtgagccaccgtgcctggccggcctccactcacattctaaaccagaatacaaggtcaggaacaagccagcagcagaaacaagaagttcagacactctctgcactcatgagtggagtccaaatatggttacagaaaatccacagaatctagtaaccaggaggaccctgatgacttgaagacattattaatctggcatgttctcatctacccaatcaatgcaaagaagaaatggattacattttttgtaataggattatttactgatgatgaatattccattcagccttaaaacttacattatactcaacaaaaacttatttctagatttagagccactgatctctagccagaaattcattaacacacatagtcaacaagtatttgttgagtatctagaaagtgccatacaggtgacaggtggaccttgtactccagaccccagtgctaggagtcaagcatgagaagtgtccaagaatcctactaagtgtgttcctcagttcagatttgggagcggtttctgtttctgaaagtctcagacacctgtatcactccacttattgctgtgggatagtatcatcgtcaacagaaagagaattgtaattaaacactacatttctactgcatgaagtctccttttaaagaatatgacttcaaaatactctaatgtgactgcagacttgttggcatttgctgagtagtgatatttttacgtatagtagaggtttttcttttttttaagggaactctacctgcatggctttaaagggctttctttaagtgagagaacagctgttctcctccaggcgttctgggctaagacttcctcctcctctcaggaacagaacaaaggcatacagaatttatgtcatagatggatttttgtttgataaatatcacttattactaaacaaaagaatggcccattctctttagaaatatgagcataacatctcctttgtctttagtggtttctaactttgttggtttacttttaattattataattgactgaatttaaatgggccgtgttttatataatcaaactttccttgaaaatgtatgtataagatggttattggtaaagggaataatttcaaattcaatattaaaataaatccaaaataatatttgaaggaatcagctaataaagaaaataaccctttggtcactgttgtaggggccagatgtggtggtcacacctataatctcagcactttgagaggctgaggcaggaagatcccttaagcccaggagttcgagaccagcctgggcaacatagggagacccccccagctctacaaaaaaaaaaaaaaaatagaaattagccaggtgtggtggcatgcatctgtagccccagctacttaggatgctgaagcaggaggatcacttgagcccaagaggtcgaggctgcagtaaactatgattgcaccactatattctagcctgagccacagggtgagaccccatctctaaaaataaaaatataaataaaacgtgtatccactttttggtggataatggaagccactgaagaagatggaggtacacgaggattggttagtccctacaatctgaccacatagataatcacaagagaataacttggatccaacacgcacttctgcaatacacattatgaacatacctttactagcaagcagactcataacaagtcctaggccatatccttcaaactgatagtcacagctttctgtctttttgggtattcagacttctctcttggtgattggccgccttcctaatgctggatacaggacatttcagggatcaagcatcaggttccatcaaattccttcaggatgtgagtttcaggccacataaatttataccacttacttacaagagtgaggagaatctctgttttaacagttttattgtagtataatttacataccctaaacctctgccaattgttaagtgtacagtttaatgttttttagtaaatttagagtgctatacaatcacagtctggtatgaacctttccaagactgcagaaagtgtcatcattttcatttgtgcccagaaatcttctgctgtctgtactttgggaagtgcctgttctggaaatttcatatacatggagtcatacaaaatggagtcttttttttgagacagagtccagctctgtcataccccagctctgtttcccaggctggagtgcagtggtgtgatcttggctcactgcagcctccacctcccgggttcaagtgattgtcctgcctcagactcccgagtagctgggattacaggcacctgccaccacccctggctaattgttgtatttttagtagaggtagggtttcactacattggccagggtagtctagaactcctgacctcaagtgatctgccagtctcggccccccaaagtgctgggattacaggtgtgagccacctcacctgaccaaaatggagtcttttgtgtctacttctctcggttagtgttttctaggttcatctattttgtagcatatgtcaataatgttctactttattgctgaatggtattccagtgtgtagatacaccacattttatttattcagtcatcagttgatggacattttgattgttttcaggtttttggagctatcaagaagaatgctgtaaacattcacatacaattctttgtttagatataggtttcatttctcttgagtgaaattcctaggattagaatatggatcgtgtggtaagtttgtgttttccaaagtgtctgcactgttttacagccctaccagcagtgtctgagtgttccatcttccccacattcttaccaacactatgcattacctgatgatagacatacagtgagttcaaagtggtatctcatggtattattttgtatttctccaatgattaatgacattgagcatcttttcagatgcttcttagccattcatatatctttggtgaaatgtctattcaagtattttgcccaatttttaatcaagttgtttatattcttagttaagagttttgcatatttcctggatacaaagtctttatcagacatgtgatttgaaagtattttctcccagtctatgcttgtcttttttttttttttttttttttttgagacaaagtctggctctgttgcccaggctggaatgcagtggcgcgatctcggctcactgcaagctccgcctccctggttcacgccattctcctgcctcagcctcctgagtagctgggactacaggtgctcaccaccacacccggctaattttttgtattttttagtagagacggggtttcaccgtgttagccaggatggtctcaatctcctgacctcatgatctgccctcctcagcctcccaaagtgctgggattgcaggtgtgaaccaccgtgcctggcctatgcttgtctttttgttttcttaatggtatgttttgtagtgccataggttttttttattttttattatttttatgtttgttttgatgaggtccatttgatcaattattttcttttgtgggttattcttttggtgtcatatttgagaatttctttgcctaatccaagatcttaggttttcttctggaaagtttataatttagctcttaaatttagctcttatgatccatttgagttagcttttgtgtatggtaaggagtcagggtgtaagttcatttttttttttgtttttttttaaatttatttattttttattgataattcttgggtgtttctcacagagggggatttggcagggtcataggacaatagtggagggaaggtcagcatataaacaagtgaacaaaggtctctggttttcctaggcagaggaccctgcggccttccgcagtgtttgtgtccctgggtacttgagattagggagtggtgatgactcttaacgagcatgctgccttcaagcatctgtttaacaaagcacatcttgcaccgcccttaatccatttaaccctgagtggacacagcacatgtttcagagagcacagggttgggggtaaggtcacagatcaacaggatcccaaggcagaagaatttatcttagtacagaacaaaatgaaaagtctcccatgtctacttctttctacacagacacggcaaccatccgatttctcaatcttttccccgcctttcccccctttctattccacaaaaccaccattgtcatcatggcctgttctcaatgagctgttgagtacacctcccagacggggtggtggccgggcagaggggctcctcacttcccagtaggggcggccgggcagaggcgcccctcacctcccggacggggcggctggccgggcggggggctgacccccccacctccctcccggacggggcggtggccgggcagaggggctcctcacttcccagtaggggtggccgggcagaggcgcccctcacctcctggacggggtggctggccgggcggggggctgacccccccacctccctcccggatggggtggctgccgggcggagacgctcctcacttcccagactgggtggctgccggtcggagaggctcctcacttctcagacggggcggttgccgggcagagggtctcctcacttctcagacggggcggccgggcagagatgctcctcacctcccagacggggtcgcagccgggcagaggtgctcctcacatcccagacggggcggcggggcagaggcgctccccacatcttagacgatgggcggccgggcagggacgctcctcacttcctagatgtgatggcggccgggaagaggtgctcctcacttcctaggtgggatggcggccgggcggagacgctcctcactttccagactgggcagccaggcagaggggctcctcacatcccagacgatgggcggccaggcagagacactcctcacttcccagacggggtggcagccgggcagaggctgcaatctcggcactttgggaggccaaggcaggcggctgggaggtggaggttgtagcgagccgagatcacgccactgcactccagcctgggcaccattgagcactgagtgaaggagactccgtctgcaatcccggcacctcgggaggctgaggctggcggattacttgcggttaggggctggagaccggcctggccaacacagcgaaaccccgtctccaccaaaaccagtcaggcgtggcggcgcgagcctgcaatcgcaggcactaggcaggctgagtcaggagaatcaggcagggaggttgcagtgagccgagatggcagcagtgcagtccagcttcggctcagcatgagagggagaccgtggaaagagagggagagggagaccgtggggagaggggagaggggagaggggagagggagagggagaggtgtaagttcattttttgcatatagatatccagtggtcccagcaacatttgttgaaaattgccttcgcacctttgccaaaaatcaaatgaccataaaaataagtatatacttttggactctattttgttctattgatctatgcatctgttttatgctaatatcacactgtctggacttctttggctttatagtaagttttgaaataggtagtgtaagtcattcaactttgttaactttttctaaagtgctttaactgttctaggtcatttgtatttccaattgtatcagcttgccaatttctacaaaaaaaaaaaaaaaaaaagccagctgagattttgatagcaattggatggaacctacagatcaatttaaggagaattgctgtctaacaatattgaatcttcccgttcatgaataagaaatatcttttcattcatttaaatcttctctaatttctcccccaaaatttttataggttttctgtgaataacatttctttcattgaatttttcttgaatttctttcattcttttttttttattattttttttgttcaagtattttgttccttttgaataaagaagcctggtgtggatggagagctgatccagcccttctgtggctctcctgtttccaggatctcgttattacaattttggctggtccagctatcggttgcatgcaccctactgggactaaaacctcaggctagcccagctgtgagctttccccattcattttctaccaagttcactacttttgctgataagatcattaggcatgtgcttctgctctgctctgaatcaagccagccttctccatcagtggagctgctggctttcacggctagccctgccttaggaaactcccctgccgacgggctggggtaagaatggagctgcctctgctggaaggacgctctcttccacgcatcttacccaaaactctagcagcttttcctaaagaaaagcttgccagtttgttgtttgtcttaagatgattttcagagtcctgaaatggttgcttttgaaaactttgttcacttacataatttttttgggtgggagagaatttgtcaacttccttattatgccatagacaaaagttgctctatattttatatatatacacatatggaatggggtgggggagagatagagagagagagagagagtgtcttgcttggtcacctagactggattgcagtggtgtgatcacggctcattgcagccttgacctcctgggctcaagagatcttcccacttcagcttcctgagtagctgggactacagacacgcactaccatgcccagctaattaaaaaaaaattgttacccaggctggtgttgtactcctgggctcaagcagtcttcctgccccgacttctcaaaatgctgggattataggtgtgagccacgatgcccagctctaaaatgtaattgatatggagaccttgactaccatgaatttcaccagtggaaatctgtttccattagtcatcatgccattaacaatccactgattttactaatatcccattgctatattctccctggtaattaacaaagtgctgctgtcatggagacagaaagagcagggtgcctctggaatgtgggcagtattccggattggagaaccaccagctaactatccaggaagacacatcacctgttttaatactagctgcttaacctgtgtctctcacacacacatataccataccacagtctatactgaagtattttctttttttttgagacggagtctcgcgctgttgcctgggctggagcgcaatggcgcgatctcggctcactgcaacctccgcctcctaggttcaagcgattcccctgcctcagccttctgagtaactggaattacaggcgcctgccaccacgcctggcgaattttttgtatttttagtagagacggggtttcactatgtttgccaggctggtctccaattcctgacctcatgatctgcccgcctgggcctcccaaagtgctgggatacaggcgtgagccacagcgcctggcctactgaagtgttttcaagctatttaactggattttcacctttagtcaaacctcactcagttaatgtctccagtttgagtaattgtcagcacactgaagtaaaggagaattccgtgggaattgcagtccctgagaggaaacagatgccaaattcaaagaagggctctttgggctgcttgggcccatagccccagaagctgaaagagagctggcactctcctggaaaccaatgaggcccttaaacttgccagccttcttcagagctggagcctgggggctggagacaggaaggggagggctcctggaggagaaggggtagaaagtgcaaccaagaactgaaagggagaaaattcactgttctgtgtgtacatcatagtggggggtgtagtgaggatagaccatttgagtactaccagtttgttttaaaagaaaatacattaaacaaggctcgcataaatgtgatttaagagagtaatctattaatgtggtccagcctgggttttgattccttcattaccaaagtgtggacataaagtaaattttccgtcactgtattatcataatacaaatatagggaagaacttaggaaatcaaaggaaacaaattgttaattttttaatgacagcagaggagagagagagagagagagagagagagagagagagaaaggtcctgaggcaaccagggaacagcttgtcaatttctacaaaaaaaaaaaaaaaacagtcaagggatattgctggaatcggatagaatctatagatcaatttggagagaactgctatctcacaatgttgaatcttcctatctacaaataagaattatctttttattcatttagaacttcttcaatttctcgaaaaatgtttataggttttcagtgtattggtcttgaatttattttgttaaaatgtttttcctaaatattttattctttttgaataaaactgagaaatttatagttctgggcactgcctgtgtggatggggcctgaactgcactggtttgacttaatagatttccctggttgttactgagttgaacttgttcctatgttgtgtccttagttttggaacccttgaagtttttcctcttaacagtaagccaaaaacctttgttttaactgaagtaccacattgcctttaaaaatagttgctaaaggtctccaagacttggatgaagagtgaggaatctggagttctagttaaatagtgacagaaagctgctggaaggagtgagagcttatgaagcagtctgatgatcttgtgccaagtttggctgaattggttaaactcagggtgtttgagctggaaaaaaggtccaggagatcatctaatatcttttttttttttttttttttttgagacggagtcttgctctgtcacccaagctggagtgcagtggcgcaataatctaggctcactgcaacctccgcctcctgggttcaggccattctcctgcctcagcctcccgagtagctgggactacaggtgcttgccaccacgcgcggctcattttttgtatttttaatagagacagggtttcactgtgttagccaggatggtcttgataatttcttgaactcagtgcagcatcccctgggaacttgttaaatcgaagtatctcagccccactccagacctactgcatcagaatctgcactggaaccggatacccaggagatttgtacatgtgaaagtggagaagcccttggctgggcgtagtggctcactcctataatcctggcactttgggagactgaggtgagcagactgcctgagcttaggagattgagacaagcttggacaacgtggcaaaaccctgtctctactaaaaatacaaaaaattagccgggcatggtggcacacacctgtagtcccagctactcccggaggctgaagtgggaggatcccttgaacccgggaggcggaggatgcggggagccgatatcgtgacactgcactccagcctgggcaacagagagagattgtctgaaaaaaaaaaaaaaaaaaaagttgagaaaccctgcagtaattcttatctctctaccttgtgcataattaaatcttagttatcaaatgtgtgaatgctaaagggtcatcttccatctaccttaatgttatggtattattaatcaaccttagatcatgttagcatttttcctagtgctgttctcacattgtgcacacctctcacagagaaccataacatcttttccacctttgccaggacttgctgtgcttgcaggtggattttgggggaaaagtggaaggtgctgtattgatccctactaaacttactctggttttattttggccactcttgagattcccctaattccatgtacttttcacacatttgatgcctttttttttgaccgagtctggctctgtcgcccaggctggagtgcagtggcgcgatcttggatcactgcaagctccacctcccgggttcatgccattctcctgcctcagcctcctgagtagctgggaccacaggcgcccgccaccccgcccggctaattttttatatttttagtagagacggggtttcaccgtgttagccaggatggtcttgatatcctgacctcgtgatccgcccgcctcggcctcccaaagtgctgggattacaggcgtgagccactgtgccccgccatttgacgcctttttaataccattatctaagtcaggatttaaaatattgaacaaggaagtgttgggtacacagcatggaaaacccagttctctgctcctcaattcggtatactttatgttgcttgcgtcctttttaaagaccacattttgggaaaatatactccttcccaggttttccccatgcgattgcacctgtgcggtgaatgagcatgtgctgccaccacaggaaattgattcacatggagacctttgggatggccagcagaagagactgagaagttgcttgagggaaaccacgagtctgtattatgatgtatgatgtatgtatgtagcatgatatatgtagcgtggagaccaaaagaaacagggtttaagaaagagagaaagatcatttttgacaaaagctgctgcaagttcaagtgtactgaaagtaaactgcttgttgggtttgccaagatggaagctatggagaccttgcaaagggcattctttttttttttttttttttcccgagacagagactcgctctgttgccaggctggagtgcagtggcctgatcccagctcactgcagcctccacctcctgggttcaagtgattctcctgcctcagcctcccgagtagcggcgactacagtgcgtgccaccacgcccggctaatttttttgtatttttagtagaaatggggtttcaccatgttagccaggatggtctcgatctcctgacctcgtgatccacctgcctcggcctcccaaagtgctggcatgagccaccgcacccagccggcattcttagtgattaaaaggaacagcttctcagttggaactgagtgaagagagaatgtgaggcaaagaattggagacaatgaagacaattcttgttatatacagccttaatctaggaatagccttttgaaaaagagaaaaactaccaggttcaaagtatatgtgcttataaagaggtggcttcatttcaggggaaaaatggtactagaactgagaaaatatagtgttgtatcaatcccagtgagaatgacaccaaaataatttaactctgtgcacctgtgatcagagtgttttgttgttaaatatatttgtctgccattggtgcataaggtaaaacgtaactcaaatgatttctttgtctgtaagatgaccctttagatatgtactggaataaaagtagctctaatcctgtggatccagccaccttggggtcttcgtgctggtgttctgttagagatggtgatgcatttgacatctcaagtgccaaatgatttgatcggaggtactggtcactggacatttttaaggacaatttcttattgcagttaccactaggcacatgcaggaccagtcatgtaaattgaggagccagtgcaaagtgaaaatgtgggactctttctttaaattattaaacatttcaacagtttcagcatagcactaaacgaaaagtgattgtgcaggtcacatactcatgaaatggtcctcagcacatgccccgcgatagtgaaacaaggatgctaaagttttaaagcataagcaagtaaaatctgtacaatcaagtgcagaagtggcagaagaaagggaaagaaataactaagaccttcagggttttgtagaaaagttcatggcctttggaagtgtttgggctggtcagaaaactggtgttttaagtatttaaaggatataaatattgtaagtgtcataaatgatataagcaaaatttaatatagctgcattttaatccaacagtgttgtcattattcaacttaaaggctgcatttgcttttttatttttcacctgtaaggatttaggagagaggtacagtgacttctcaggacaatgggaatgatatgaaattttaaatgtgttgcatattgtggtgctattgtgttttgcgtaagtgcaataataattttaatcaggtagaacatttaaattgttgtccttggaaacaaaagagaaaactgcttcacgatgaatgaattaaagttcttttctctgccaactaaacttgtatactaaatgaaaaatcacagagtcattgaatatgagcatttaaatgaaccattgtgagaggagtaagtggatactgataacatactgtttttctgcagaaaatatttgtggttaacttgttcataccatgtgtttctcttacaatcaaaacctctgtctttttcaaggacaccttgagcacattgctagggaaatggaactcttaacaaaaccctgctaaatccttctgcttaccaccccctcttgttttctgattaaacttctcttcatcgtctcacatgaggggggaaaagaaatcaacttgttaaatgccagactcccaggagtttggatttgacttttctctcactgtttgtatggggtctttattccctccctccctccctctctccctcccttccttctctctctttttctctctctctctctgttctctttctttctttcaatatctctccctgtctttctttctcaccacccacatattttcttgtcctgtgttggaaagggctttggtccttgcctggtggaatcgctagaatatcttaaagcttttcttttactaacagccatcaatgattactttggtttagtccaaaaaccaagaatttgcttttgaaggagggggttattctccccttagtgtttctgcatcaagctgaaagagctccctgcttagagtaagtcaagtcaccttccttaaaaaaaaatactcccaggtgttagagatctctttattagagtcataaaataactactggttattttaaatagttccctttggaaatgagagtctcgttttacattaaacaggcaagactttgatatatttcacatatttaagccttagctttgattttttagtcatactgagaatactggtctttgagacacaaaatgagttcatttagtagtggtttaaaataatttttaacttataacaaataactggaaacagaatttctttaagcaggggactcctgttatgggaacatgtttggtggcaggtttcccaggggagaggatccgggaataaggaagcacttattgtagggtgccattgccacttgctgatggctcagaagtggagctgaggcctcttggaactatgtagtattgggaacgcatgttcatgtatacttaattttaaaacacacctactttatgacacgtggctatatttgtattgttttctggggaaataaaaggtttgagtgaagatgaatttcgccacaacttgtaaacagcccccctgaacctgttggggatgcattgctccaaatcatttcagtttaatccttcccccatctccacccctcacacctttcctatgtgttcacagccctcagcattcacggagaacatgtccctgaaaacgtgctggagcatcaagtgcaagaaatcagataataattatgtttgaagagggtgattttattccccaggagaaataaaacctcgctcaggcaacagggggtttattgaggaccggggctggaggcagctgctgccaggcccacgccaggtcattgggccttcgcctgagctcttggcttgagcccctcccactcaccttcacaatccatgtgggtgagaggtcatgggcctcctggctgccttgttcctgagatgcacgggatcctggaagaggaggtagggcaaggacactagcagagtcacctcaccaccaagtggaattcttcctctgcccttaactccttgcaccttccctaccagcgttttgttttgttttttttgcccaggctggagtgcagtggcacgatcttggctcactgcaatgtccgcctcctgggttcaagtgattctcctgcctcaatctcccgattaggtgggactacaggtgcttcaccacgtctggctaattttttgtatttttagtagagatgaggttcaccatcatctcctgatggtggtctcgaactcctgacctcaagtgattcgcctgcctcagcctccgaacgtgctgagattacaggcatgagccaccaccctggcccctagcaggtttctttacctttatggtcccaattaatccctttggcagagcttgtggacctattctcagcatggtttttgttgctgttttttttagagacaaagtctcactgtctcccaggctggagtgcggtggcgaaatcatagctctgcaacctcgagctcctaggctcaagcgatcctcttgcctcagtctccccagaagctgggattacagacctgagcctccgtgtccagcctcttgacatatttttaaatgcataaagaatatattagacagcaggcactgtggctcacgcctgtaatctcagcagtttgggaggctgagatggaaggattgtttgaggccaggagtccgaccagcctgggcaacattgagagactctgtctctacgagaaaaataaataaataaaatcaaccaggcatggtggcatgcaccctagccccaggtactcgggaggctgaggtaggaggatcgcttgagcctgggagttcgaggtggcagtgagctgtgattgcaccgctgcactccagcctgagcaacagaataaaaacctatctccaaaaaataaaataataataataataaataattttttaaaacaaaaaaagttagaaagaaagccaagtatgttgaaattcagtgttacccatgcatggctagctccctctcattttttacataacccgttcagtgttacctcctgaggtgctttcccttctcggcttacgtgacaattaaaagattgtgatttacaaacatgcagttaacttacaggggcataagtactcagtgtggcaaagccaacagcagcaagaacaataagatcaaatgagaaaagggcagggaggacggaggagacgaagggaggaagggaagggggaacgggcgaatcgtgctatgaggccatgccttgacgagcccctgagctgagctgaggtcagcctttcctttaggcctctcactgtgcacatttttctgggctaagagtatttcttctatttcgaggtatgtgcttttcatacccagtggcccctaaaggccaacccacttcttcttctaaaacttaagagaaacagagattcaaatatatgagctataatcatgaaagactaattatatttgaggaaacttagtgataccccctgataatatgaacataataagagcagctatttgttgagatcttaatacattgtatgaaaccctttacctacatgatctcattgattgctcacaaaaacgcctgggtgccgtgcttctcatcattcatatagagagactgggaggtaaagccctcggccaaggccacactgatggcagccagtagacctggaattcacactgggggctgcctgacttgaagcctgtgttcttcctctttatcaatgccatctttcctaggcactagcgatttcagagtttggattccaacaaaatccaaatacatattgatataaaaatacataattagaattaacatttccatttgaaacctggacacacaggttagacactcaatatgctatatttgaatagaatttactgtcttgaaataattccgcatgatgtaggtttactcacatcctgaggagtgggccaggggaaggaagagctggttgccatgggcatcggctggaagcaaagccatcctccaggatcctctggcttcctgagccaagatggcgtggagcatcatctgtttctcttccaactcatcttatggtggaagttgtgaaggagcaactttcctgccagtgctccaccccttattcacccattcctattctggaagatagtgataaaatctgattcttaagaattggaaggttaacctatgaagggatagatttaaagacttgatgaactttgattttacctgcaatacctcaaccaggacttgttactgctaccaaaattcccacttattatgacatttttgtcatctttctgaagtcattacaggacattttatagacctttctttttttagatgaaagggtcaacttcagtccgacgcacaaagaagcaaagaataataatttttctctctatttctatttgcttcttttgtccaaaaagatcaaagaattaccaaattatttctgtccacccttgcgcacactgaatggagaaaagtttttctcacttcattttctaaatagagagatcatggtgggcagatttagctggtagtttactaaggtaaaattaagaatcacagcatctcagaaaaaaaggactcatagagatactcatttaatagctgaggaaattgaggctgagaatttgacttgcccaaagacacagagtcggcagcaggctgagtctagattttaggtgctcggtcccgtgcgcctgtgtggtccctgagggagaggcagagggatctccttccttcacttactcattcttccactcaggcattatcgtcattcacgcgagccagacactgtcctagggccgtttttgtttttattttttggaaaaggatagtgggggagaagaactggggagagacaggtcagtaaattcatgatctctgtatgaatgataagtgcagtggggcatgctgagctgaggtacaaccaaagacattcgcctggggttcaggaaagatctggacttggctggaaggatgaatagggcgtgaatggatctatgaaaggtacaaagggaaggaaattgaaatggatctaaagagcatggagaggagtcagtgaaagacgttgtatctgttcctgtctgaatgcatgcccttctatttctgcctagatgatgcctgctcatttctcttgctctagaacatctcctcaaatctgttttcaaatattgctgcagttttaatgttatgtttatccacatcggtgagaagaagcttctctttccttcttggttgtgagaaccctggggtcaggaaaagctcggtcattcatcatagtgccctgggaggtgcctggcacagtgctgcacacctaagaggtgcttgttaaaagtttattgaccttaatcaaacattcattctcagccgctttttctgacgcatatgtgtaaatcatagatatgttactgaataggaatccagccaccctcctaaaattcatgtcattagaataccttaatcttattaacctggaatactatgttattagaataccttgatattattatcctggaatattattaaatagttccagaatttttcactaaatcatgctatttgtagttgttagaggtgctgtttttattgctcagtcaggtgactaccaggtttcaaagaaagtgctgattaacagggtagcttctttctaataccagacttctctgatcaaattatagatgttcacttgggcgaatgggtaagattaagggtaaaataggccaggagcggtggctcacgcctgtaatcccagcactttgggaggctgaggcgggcggatcaggaagtcaggagatcgagaccatcctggctaacgtggtgaaaccccatctctactaaaaatacaaaaaattagccgggcttggtggcgggtgcctatagtcccagctactctggaggctgagacaggagaatggcatgaacccgggaggtggagcttgcagtgagcggagatcgtgccactgcactacagcctgggcgacagagcaagactcttgtctcaaaaaaaaaaaaaaaaaaaaaagaagaagaagaagaaaaaaagagtaaaataaatggaaaacaaaatggatttgtatgttttttaaagatcacaaatttctcaatttagattgagaaatttagaaacttaaattcctacttttccaaatttctccatggattgaataagtagctttgtttttcaaaataaaaactcccaacaccagaagccaccctgattattcaaccctataaaatattcatattctcttgtttcattctggaaaaaaatgatctggaaatattgcctcagatcctgtagctaagaattgcaaatcattttcttttcagaacatcaccttgattttgagtatggatcaagcaaatacaacattttctagaactcagaaacttttttttttccaaaatggaaaaaaaacctcatacttctcttacacacaaatgaattaagactttgaatgcttggcttctgaatcatttgaaaaatattggcaaagaagttgttgtaacaagtctcaggcctagccaacattttagatgctttggttttaagacagggaagatatattctgctgggaagaaatccaaaaacctctaaaaatgaattataaactatctggaagtgtctcagctgtggtaattatggtagtagcattgttgtctgccaccttggtggccgtttttcacctaatgtttataagagaatcttccagtaggttaacatgatcctgaaatgcacttcaaaaggccaagtgtacagaaagggtttaaaaacagtaactgctagtgagtgagaaggaatttatttcatgctcgatggagtttggctttataaattttttagctgctggttaaatccacagtagaggaatgattccattgtgtgtcctgagtggaagaaaaaagtaaaaattagtatcacagtaacagtaactgaagtgaataacatttctcaacaaaaaacatgcagactaatttattaagtccttgatgaagtagtgggaaaactgtgtcacgccacatagctacagtcctcgttctacccttgatttttatgtgtaaaaccaaacatagcttcttggtactgtcctgatcctaatgctccttctcactctctgatttcctatctcacctcctgctcaatggtcatgtggttcccctttattgaactatttcagtagtctgcaatgagtcagcaaccttagggactttaaaaaaaattctatttaccagtctgggcaaaaagagtgaaaccccatctaaaaaaaaaataaaaattctgtttaaaacatgcttgctctagtacacatttctaaccccacagccccaccgccgctttttttttttttttttttttttttctgagacagaatctcactctgttgcccaggctggagtgcagtggcgtgatctcagctcactgcaacctccgcttctcaactttaagtgattctcctgcctcagcctcccgagtagctggattacaggcatgtgccaccatgccccactaattttttttgtaattttagtagagatggagttttaccatggtggccaggctggtctcgaactcctgacctcaagtgatccgcccgcctcggcctcccgaagtgctgggattacaggcgtgagccattgcgcccggccccaaccttctttcatcttctttcatcttggaacagatgtggttctttgcaacaaaaggatagtgattaactatgaaaagggagtaaatataatatgtaagacatcatttttagtgaatatttttttccaaatattagcttatctgagaaggaagatttagttttagtgaaagacaacccaaatatttttatgaaattaattatttgaaggttttacttgcataggcatgctaatgaagtatatttcttctaaatatactttcaataaaaaagcaatctttctttttattaaaagtatatttagggcccggcgcggtggctcaagcctgtaatcccagcactttgggaggccgagacgagtggagcacttgaggtcagaagatcaagaccagcctgaccaacatggtgaaactccgtctctattaaaaatacaaaaattagctgggcgtggtggtgcgcatgtgtaatcccagctactcaggaggctgaggcaggagaatcgcttgaacccgggaggtggaggttgcagtgagccaagatcgtgccactgcactccagcctgggcgacagagactatgtctcaaaaaaaaaaaaaatgtatatatatatatatttagaacagccaggtaagaaacctgtctagtgcaaagaactacctgatgctgattactataactgagatattattctccaaaaacagttaaatttatgttcatgaggtttgagctgctttttctcagtggctcagggcaaagactccagcatacacagtgtgtggtgcctccatgactccctggccccctcccctcctcaataacacaagaccctgcagttactcagattgggaggtagtggggagttcttttgatgtcctgcaactggtgggggtgaataaggagcaagtgggaacattcgttaactggtgaagtatttgttgttaatagagaaatgcattgtgaagtcagttcttgtaaccttggtttctttttcttgcttgactagtctttgtgaagggaatggatagagttgattgtactgtaaatctaattgcatgtatgtaatacagagccaaaaaatgtcattttagctgtttggacaaaacgctatagtttaaaagcatattttatttaaaatgattagctgataagagaaatttgaatcagaatacctgaatattatggtcataaaggatggaggaaattattgtttatcttagtactaaatagaataaacgtcagcccctgctacaggtaagtaccacacataagaatgtatgtgttactgtaggagctacattattacataaaatataactgtctaactactggttgatgaaaataataaattggggagctgcatgattaaacacaatgactcatctggttccgcataaagcatttttttttcttattttatattaaaaacaaacgaagtccctttacagggatatgataaaaataagcatctttaagttaaaaatgaaaataaatatattaaacatagtatatgatgtaagttcatgctatgtttcaaaattaagaataatgctttagagtacaaatattaaataactattttatcttgagagggtaaggacttattgacagaatggggtccttctatttgacagaattactaataggtagttctgttttatgtaaaaagtttttgaaagactacctaatgtatttttttaatagatgcatggtaaggtttttagtgtagcaagtgttagagaaataaccatttttgtttgataatttaaaatttaaaatatttataatggaaaagatcattgaacgtattaggcagtgcctaaaaaataacagtggaagccatgaattccttctgtgttactaaaattacactgtgctattttaaatttcactgaaaaataaacatttcagtaatggtatttctatatggtttttacaaagaaaagattatattctgtgatcttttaagatcaagctgtactatgttagagaaacgccactaagctgagaccctcgcagtatgctctcagctcagtgtccatgcctggagaatgtctcttcaacatcgcgtacaccattgtttctagatctttacagaatcttcactgctgctatccccttttaccaagataaagttaaatctccaaagaaccgaatggaggtacttttctcacagtcacccagaaattgtttcctgaatagtttggacctggtactgatcttggctgcttaaagataaaatcagctgagacaaaggaacagtacaaaggcaaagatcaataatgacttgaaaagcattttgaaaactgtatctttgtgttctaaaattttattcagcaaagaaaacaggagtaaagaaagagaagagagagacaaaaaaaatcctagataattatagaaaagaccttgtaaatactaccagagtcaactggaccaaagtgaggacagaataaatgcccttctttcaagtgaaagacgtttggattgcattgataaatatatgcattggatcatttgaaacttcccttaaggcctgtttcacaacattttattgtaaacattttcaatcagaaaagtggaaagaattgtacagtgaacacccatactctcgccttggtttttttttgttgttgtttttgaggctcagtctcgctctattgtccaggctggagtgcagtggcacaatctccacagcggctgaactgatttacactcccaccgacagtatataagcattcccttttctccacagcttctccagtatctgttgttttttgactttttaataatagacattctgactagtgtgagatggcatatcattggaagccagcttactttgtggtgcatttcgaagtgaattggagacataagtagactttactcctaaacatttccgcatgtacattggtatttatgattcttttatttatttatttatttttgaggtagaacgtgcacatactaagatacacggatctacccaaatcttacttaggtgtactcattctatgatttttcacaattgcatctgcctgtgaaacccaaagctttatcgagatatgaacgtattaccctagaaagttcctctgtcgtttcatagtcaatccccaccccctgcaacaatggtttgacttttctccgtagatgaattttgcttctcccagaatttcatatagatgaaaccatgctgcgtatacggtgtttgtgtaaggattccttcattcagcacatagactttcaatctccttttgattcacctaccaagtgggatggggtaagctcattctttggatttcaagtggctcagctgatttggtaaattttcactttcaggcctgtttcctgccattctcaatcttgccagcaatgctcacatcagcaccaatgccacctgtggcgagaaggggccggagatgttctgcaaacttgtggagcatgtgccaggtcggcccgtccgaaacccacagtgccggatctgtgatggcaacagcgcaaaccccagaggcaagtgtcgcgcctttatttctgaaattcccatgggaatgtacactttgtgaaatgaggactgagacttctgttaggaagccataaacattgtgttcaccttcactgctctttgtttccactagcattacggtttagaacttaagaaatttaaagcaacagccgagaggaattcatgttttttattttctttcaacagaacgccatccaatatcacatgccatagatggcaccaataactggtggcaaagtcccagcattcagaatgggagagaatatcactgggtcacaatcactctggacttaagacaggtaggtgagcccagaaccattgaagagtgtctacaggctgctgagctgtggtcttctgatgacctttgggaaagtctggcttctttctgaacacatttacattctaatctcactatttccaccaggtgaaggcaagtggtatacagaaggagtccctggtgccatttcttgtcactttcatcattcccaggtgtcttcagggagatgggtgaaattgcttccatatggttgatgttcttcgaagctgtgtcaacagggcacactcatccatccagggtatcatgtcaggctgtttgctggctgccaacagatgcatggggagggagagggggaaaacacatgtatttcctaacttttagcttactgtcttgctaatgtcattgagtaagttattgtataaggattatataaggctagaagaaaaaaagacaaaacggtgttaaacctcttgactgtgtctcccctgccacatgtagtctgtctgggccaggtaagctggagttgcccaatagtaacttaagcagtgccttcagcatgagtggggagagggaaggtatgactggctccagccacacctgcatctccttaccttgcttcaagtccacataggaggatggagagaaatatgagatgagccccagttgccctgatgttcctgggaaagaaaaacaaaaggagtctgagtggaaggaatgaaaaagagagatggcaggtgttttggagctgttgtcctggttctgttttgagcttttcagaaaagccatcgcattaattcttatttatttccattcagtttctcttgtgttagaactcataagtttcatgtaaaatatgagatcggttaaaagacacaagtaattgtgatgtgcattgtaggatttaaataggaattatagagatttaatgacaatcagaattctttgaataagtgatagttttaaaatgtgcaggaatttttttttattttttatttttattttttattttttgagacaaagtctcactctgtcgtcaggctggagtgcagtggcgcgatctcggcacactgcaacttccgcctccccggttcaagcgattctcctgcctcagcctcccgattagctgggactacaggctcctgtcgccatgcctggttaatttttttgtgtttttagtagacaggatttcactatgttggccaggatggtctcatctcttgacctcgtgatccgcctgccttggcctcccaaagtgctgggattacaggagtgagccaccagacctggccaaatgtgcaggattttaagaagacaaggtgatacttcatatattgatgtacaaggaacttgtgttctgtaataattacagcaaataaggtagcaagatgtgcagctcaggagacattttccaagttcaggttcacagtattatgaaagtaaaataacacttttaatagctttcaggtataagacatgaattaatgtgacactccttaatattttcaaatccccttaaagaaaaagagaaaagagccaggtgcggtggctcacgcctgtaatcccggcactttgggaggccaaggcgggtggatcacgaggtcaggagatcgagaccatcctggctaacacggtgaaaccccgtctttactaaaaatacaaaaaattagctgggcgtggtggcaggcgcctgtagtcccagctactcgggaggctgaggcaggagaatggcgtgaacccaggaggcagaggttgcagtgagccgagatcacaccactgcactccagcctgggcgacagagcgagactctgtctcaaaaaaaataaaataaaataaaataaaataaaaaacaaaaaaaaataaaaagagaaaagagcttctttgaaaagagcttctttgttgttgtgttttgttttttgttttttttttttttttgagacggagtttcactcttattacccaggctggagtgcagtggctggatcttggctcactgcaacctctgcctcccgggttcacgcgattctcctgcctcagcctcctgagtagctgggattacaggagtgtggtctcgaacttctgatctcaggtgatccaccggcctcggcttcccaaagtgccgggattagaggcatgagcaccacgtccagccaagagcttctttttaaccctggcctttgtgtttatctcagtggtaagaatggttctctggaagatttcggtttttcccatcacctttctgacatattttcctttttctaaaggaaaaagtaaaactgtgttcattattaagaatgtgatattatatgagtttggccaaattaagacctggacattttacatatagatttcaaacctctgtaagtctatcctttgtcttgaaatttgtcatgcttgacttcatcctgaagggatggactaagttagtctgaggaattccagaaggcagtctccattttagatgtttaaggcatttttaaaaaataagcatagacagccaggtgcagtggctcatgcctgtaatcccagcactttcggaggctgaggtgggcggatcacgaggtcaggagatcgagaccatcctggctaacacagtgaaatcccgtctctactaaaaaagatacaaaaaaatgagccaggcgtggtggtgggcacctgtagtcccagctactcgggaggctgaggcaggagaatggcgtgaacccaggaggcggagcttgcagtgagccgagactgcaccactgcactccagcctgggcgacagagcgagactccgtctcaaaaaaaaaaaaaaaaaaaagaaaagaacagaaaaaaccatagacatatagttataggctgctttaggtaatttttagtgttttaggatatgcttttaaaataagatcacttaaaataattagtattcagaaatttctttaccatttacacagtataaaaattctgctgtgctttgtttttttttaaacaaagcacattatgcttatatctgatcaagcctttctcagatttatttatttattgagcctttttattacaaacacttttgcatatgtagaaagcatattacagtgaatacacatatacccacccttgagatttggggattttaaaacactggaccatgttcgtttcagtgaattgcagtcatcacaacattttgccagtccttcagtttgtgtcttcaaaaaataaagacgtttgttctgattagataccataccatttcagcctccttgggcaaaattaacagtaatttcttaataactcttttcccatccacattcaattttcccagtttatcaactagtatcttttactgcttttttttttttttaaccaggatccagtaaggaccacttgttgcattggattgctatgcttcttaaatctcttctcatctgaattgtccttcacttaaaaaaaatgctattgaatatatgaatagaccagaccagttgtcctgtagaatatgccacattctggatttgtcagattgtttcttcatggttttatttaacatattcttctgtgctctctatttcctatacaccaaattcagctctagagacctgattagattccagttaagtgtttttcagaagaccacatcaccagccatcctctcacctcacatcaggaggcacccagggctggttgtcccactagtagtggtgctaaatttgaattctctctgggtgttaaaagtcaggtttcttccttgtaatgttacttccttttttctgtcccatatccccattgtttcttagatctcactgacattcagatctacagcatggctacaccttctgatgacttttttttaccttgccaaaatctgcatgtttccttagccattagccaactaccagttgttttctagactatatactccatgagggatgggaccacagctgtcttctacttttctttctctgccctttcctttcctggttagtatttatagagagatgtcttattcacttctgcacacccagacattggcacagttcaggcactgagtcaataattgcattatggatcagtactttttttttttttttaaatggagcctcactctgtcgcccaggctggagtgcattggcgtgatctcggctcactgcaacctctgcctcccaggttcaagagattctcccaccccatcctcccaagtggctgggactacaggcacacaccactgtacccagctatttttgtatttttagtagagacgtggtttcatcatgttgcccaggctggccttgaactcctgacctcaagtgatctgcctgcctcggcctcccaaagtgctggaattaccggcgtaagccaccgcgcccagcctagtgctttctttcttccgttattttttttttgagacggagtttcgctcttgtttcccagactggagggcaatggcgcgatctcggctcactgcaacctccgcctcccagggttcaagcgattctcctgcctcagccttctgagtagctgggattacaggcatgcaccaccatgcccggctaattttgtatttttagtagagacagggtttctccatgttggtcaggctggcctcgaactcccaacctcaggtgacctgcccaccttggcctcccaaaatgccgggatcacaggtgtgagccaccgcgcctgaccttgtgcttttttaaaaattttttttaacttcccccccctcctcttttcttgttcacagtctgaatagaaaagaacaaggaacaaaccttttggctgctttgtttcagtactataaaaatgtaaaatctaaagtatagatttctaaagtaaaattacaggtagaccttagtcttatcaagagttgtaaaacttaatattataaatgtgtttgtgtaacttggtaaatatcagctcttgaggttttatgaccaaattagctgcattctgtgttggcaaatgctaacattgatcctgttcctgattctctaattgatgacagctgtcagaattacagcatttttttttttttttttttttttttttttttttttttgcctctatgtattaggtttggttatctgcaagataaactaaagaaaagattaaaaagtagtcttatcagaagtccataaatgttgtatggtttgcaataaggtttaactactgtttattttagtaatgtattacaagaggaataatgagatttacttctttgctttttaaaaataatgtctactattcacttctttcattgattcacagtattttagaagatacactgtcagatatctagcagtatcttacttttaaaaaattcataggaatttcatgtgtgtgatatttttaagaaaagtaaagcataataatcatcaactttaacaaatacaaaattaacatatatgttgtggtctccattaataaaatgctgctcaccaagtggtttaggatctcatatatcaatactaccactgaacagtgatcttttttgacaacttaaaatttaagagaaattattctgaaagagcatgcacatttcatgaatcttgcatttataattgtccaaaatcctataggttccacgaattacaggaaaatttattccctatggtagcatttctcagtagaagaacatgaagatttcctgtttgagaaccactattttaaaagttaatacactgttgagatgaaaagatgttcatcgtcattattcaatagggaagtgaaaatcaaaccacaataagataccccttcacacccattaggattgctatattgaaagagttggaaaataataagtgttggtgaggatgtgaagaaaatggaaccctgtgcactgtgggtggaaatgtaaaatggcacagtgttatgaaaaacagtgtggttgttctggccgggcgtggtggctcatgtctgtaatcccagcactttgggaggccgaggaggtcagatcacgaggtcaggagattgagaccatctcggccaacatggtgaaaccctgtctctactaaaatacaaaaaattagccgggcgtggtggccaatgcctataatcccagctacttgggaggctgaggcaggggaatagcttgaacccgggaggtggaggttgcagtgagctgagatcacgccactgcactccagcctggcgacagagcaagactccttctcataaacacacacacacacacacacacacacaaccagtatggttgttcctcagaaataaacatagaattacagcaattccactactagggaatgccgtaaagaatttaaagtagggactcaaacagatgccagtgttcagagcagcattattcacagtagccaggaggtggaagcaacccagatgtccatcaaccatcaacaggtgaatggatagtcaaaacatggtatgtgcatacagtagaatcttagccttaaaaaggaatgaaattttgacacataccacagcatgtatgtaccctggaaacattacgctaaatgaaataagccacacacaaaagaagaaatattatatgaatcaatttggatgaagtacctggagaagtcagttcatagagacagaaagtggagcggggtggttgccaggagctgggaggagagagaatggggagttgttgtttaatgggtgcacagtttaggttcggaagttctggagatagatggtagtgatcattgcacaacagtgtgaatatacttaatgccactgaattctacacttaaacatggctaaagtcgtggtttttatgttacgtatatttttctacaacttaaaaaagttaatacactgtgaaatatttggtgtattatgtcagccagggtcagtcaggaatatggaagccacaccagtcatttaaaggcacaaatttagtgtgaggaattggtttgacagtgtgggagagctgggagagggagcaggaaggtaacttgggggtagtagtggtggaggaggcagcaacgcaggagggtgtggttatagcacctagagcctgggaagagagtctcctatctttcagaatgctcttctgggggtcctggaaagctggaggctggagtcagctgctacagcccaaggcagagggccgctgctgggcaaggctgataggacccggaagtagacatgggagaagtcctgcctccctccagccctccagcctcccactagtgtcgccgtcagggagcatcgatttgcagcgtcccagcctcagcatccaaagctgggctggcaggtgcttagcaaccagcgcaaacacttcttctcagtaggtggtcacttgcaccagtataccaacagaaacacagagacagagcagccctcgacatcctggggcaggattttgttattatggtggtcagccacatcctaaatatgctcatattaagttttttagaataactttggaatgaaaatgcaaattttagaattctcctggagaaatcatggactgctgtctaatacattacaaactaggtattcttggttctcagccgagagactgcatcagggcaccagcttggtcctgggaccttcaggacagggatggaggaaatacagaagcagttccatttatgtattaactattgggttttggtggtgtgatgtggtggagatgcatgaagtgtggtagggtgatatatacaaagtgaaatgtgatagcttgaaggatgtagagtacctaacaaactcctcacatttaataaacatgagttttctttccctctgtcatatttctaatacacaaattactttaggttcccaaagatcttcagatatcaccaagggaaatgttaaaccaggccttaatagaatctaattacagttagctaacaggattaaggagtgcagttatgcagattttgagaaattcataagtcaataattattctgttttttctgattaggaaattaagatggaatcatcatagaaaaatggaagataagataagtgtaaacaggcagaaacacatcatctcttcgctctgtaacaatcgctaattgatcccttgggatatttactttgtcatttgcctacaattctatgcatttaataatgctacaacaatactatcatgtattacatacttactgtgccagacattgtgctatgcacttgatcaggattatgtcattgaattctcataatcgcctgtgacttggctcctgttattatccccttttgacagatgacgaaactgagacttagagagtttaagaggcttgctcaagggtaggactcactgaagcttaagagcctgagctctgcatcattgcaccactctgaccctccagctgagacagattatgtgatatataaatttgtgttctaatgttttatgtaattgtatagcatgaacatttcccagtataactgaaactcatgattaataattgttaaagctgcattaatagtttctatatggcttacgcatcatttgcctaagaatcctcaggcctgacattttggtgctttttctgttatgggtaataacttgagctttcagtgaaaaaaggttcatttcgtatgtataccaatgaagtaatacagtgagtatcaatcatgtttgaggtttatatgacaaatttatggttaattttgttttgagcatcttttgaaagaggaatgttattaacaggtacatatataggaatttatagatatgggttatagcatttttttcctcgtccatgttatttcatctgcttttcccagcagttctggaatgcgagtgatcgcctctttgcaggtacaaaaatcacggcacagagtaagcaggtcacaggcttgcccagagtctacggctgcaggtgctcaagctaggcctggaaaccaggacctctggttccctctacaccatgccacgctgtctccttgtctttggtctccaattattgttttcctttgttctgactttatggggagactggcaagagctcttgcaattccctcttgatgttgggagtgttcagattctagccctttccctcttgttctgtttgcctgctcagtagggtcctctcccctatgaatccagcagggtattgacacttccttcatgcttttgcagtggctgatagaattgggtgctacctaacgtgtttttttttttttttttgatcaagaagcaggaaaataaatcagttatctcctattttccttaaaaaacttttaaagccggagaacatttcagtgggagtgagggtcagatttgtgagtaaaaatgtataatagtcttttagaagataagatctgttttgtaaaaaagggaagttccctatggcattgaaaataaagctgccttttggagcagtgctttattttatgtgtaggtttaattaggaagtagcactttgttgtgggaacataatcacagaggagcctttgttttatgcaaacttttagacaagagctgcttgtgtgctgggttttgtaaaacctcattaattcagatgtcagttgttttttcccccaaatttctgaaaaattgaccagtattgagtgaggtttattattatatcattcaaatataaagtatttattaagcacatcgacaaggtcaacaagaaaatagggaaatttcacattcttaagataaaatctttaaagatttttattgcaagaattgcatctaaattggagcgtctcattacaagtgaattttggctgttcctggaaagagattaggcagaaacccttcctagaagcactcagatagaaattacttttactgtatgctttttgtactctaatgattctattccagttttctattacttcatactggcctccaccaatttcaaatattaaggtttcttgaatttgcttggtaaaataaatagattggaagaaatcttaagctcatcattatgatttggaagtaagccaccctaaattcctgtccttcagacatttttatctgtgttgtcatgttctctgtgaagctactagactcagaaataggtctttcttttgttttcacattttcattatctcgttttattttctcatgcatagcttctctgctggttatctattgtgtaagaaatcactgtgaaactttatggcttaaaacagcaacattcattttatacctttcctgatttcagtggggtcaggatttaggaaaggcctgagtgggtatgtctaaggctgcagaccatggggggctagacttggagcagcttaggggagaggttctctggggcagctggaggagggggtttggggcagctggggaagagggtgccagaccagctgggagaaggttcctggggcagctggaggctatgttcatgagagttcagggcgtctccgtgtggtctttccacatgggtgcctgagcttcctcacagcatggcgactttaaggcagcttgcttatagggcagcttggggcaggaggcagaagttgtgtcccctcttagacctggtctccagtcacacagtgccagtttccctgtgctgtatgagccacccagtcactcaggttggcagagattcaacttgggaaagatagaccagcctcacccgtcaaccggaggaggggtgaagaatttgaggcctgttttaaaactgctactgcatcagccttctgaaagggtctttctctaggaggctttaatctttgcagccttgcatatcttatcttgtaggggccgcacccctgtctttaggtgaggtgaagagcttataggaaccaaacaggaatgcacatactgttcttttaacgataagtgagctgaataagtgaaaacaatggaggctaggctttaggaacaagatggagtttttgtttcttgatacgatttatatttaagctttctcgcttacatattatcggtggggattgccaaacagtccaggataaccattttgccatttggcagagctcagttctctttagattttgagctgccaaggtttggctgcactatttcagtgtttctacccagcagggcttcctgcatttggcctgggaggattcagggaaatccgtgaagacagttttgcaggattggatcacaaaatgcttttcatatccccaactgttttggcatcaaagtaaagatttttgtatatttatgggaaaaaagggaagtccgttctgaaattatttcttccattatattgaagctgaaaaaaaggggtaagttttaatttctcaagagatatttctttgaaaaatatagtgcagtttggtatccattctagctttttttttttcttttttatgtattgacttaacttctactcagattgtagtatttccatctttaaaaacaaagctgtaacaacgtttttaaaacatggcttataaaaacctcagctaggtctcagaatatctcttgtgtttttaatgtcttcagtggaccttttctctacacagaacttcctttattttgatgtactagtaacagataatagcagaaagtttttaaactatagaaaaatataagaaaaaagttatttaaaaaatcccctgtgattcttacaatcaggggtgaccttttgctccattgcatcatatctaagaacactgaatatatttaagaaatcagggaatctctgtcttgtgcatactgggatctcaggattcatcgatgaacaagacaacgatcggattcacattaagcccttagtgcaaagaaagtggacaacacatgggcggttccttcagtatgttggttattagcagtgatgagcaggctcgctttcattgcatctttaaaggcaggccccagctctcaaggggcttctggtctggtggggaaaaataggcttctgctgagtggtgtagagtgtgcagggaccgggggtgcacagagaacacttcagaaggaccacttcgtggctcagagaaacaatgcaggccgggcgcggtggctcacgcctgtaatcccagcactttgggaagccgaggcaggtggattacctgaggtcaggagatcaagaccagcctgaccaacatggacaaactctgtctctactaaaaatacaaaattagccaggcatggtggtgcatgcctgtaatgccacctactcaggaggctgagccaggagaatcgcttgaacccagggggcagagtttgcagtgagccaagatcgtgccattgcactccagccggggcaacaagagcaaaacgccgtctcaaaaaaaaaaaaatgcgaaaaggacccaccggaggaagggaggcaggaatacagaaggaagaagcagcagggaagagcagggtgggaaaggcctggaaattagaaagcctggcatgtctgtggagctgacatagtacattcagtcctagaataaacatttcctctcgtttttcttttctatttattgggacataattgacatatagtgaaatgcacaaatctcgagtgtatagttgggtgagttttgataaatacagacacttgtataagccattcccttggtatagaacgtttgcgtcaccccaaaaggctcccccacccccttcccagccaattccccacttgctctcctccctcccagcagccagaggaaccgctgtcctgaattttttttttttttcactttggaagagttttgcctgtgagatgacttcttattaatggaatcacagtgcgtccttttttgtgtctggcttctttctgtgagcatgaggtttgtcagattcacatgccattgcttgtatgagtggcttgttccattcatttctgtgtagtaatttcactttatggatatagcaacatttatttatccactgtcttgctgggtatttccagtttttgtctattgtaaaaatgctgctgaaagcaaagcaatcctgggctcttctcccaggagtcactgtcccgtgctgcctgctgtccaatatttgaaacccattgtttatatcctgtgtccagagttctagctgttcactggaggagagccaggtgctaccaatttcttcttcctagcgaccagcaaaatgcctgtaataatttttaatggaagaatgatattttatcatttggctacacaataattcatttaacctgttcccattgggagacacttaaggtgtttccaatttggggctattctaagttatgctgcaacaaacatttgaatattttatggctgttacggtagtttattttttagtgtcgattccaaaaaattagattatttggttaaatgcttaaattttttaaaatgtgatctttattgccttatttttttcaaaaacattgctcaatttatatgctcagtaacagtgataaagtgtgtttcacaattccttggtagtatagagatcagaattttcttttcttttcttttttgtcctatgctaattgaatagcagagaatttatttgtttataatgagttgtcacattatgtcactgtactggacatatctttgggaggactaagctaaattcagatgcttaaacaatgtttggtctgatttattatcttcacatgtgtaaattttatgattattaatctattgaggcagtcaaattgctataacacggtggtgacatttttagatattgaatatcaatattagaggctggacagacttttcaagtcatattctaaccaaagagaaagaaccgatttgactctaagtctcattattttgagaagttccagttgtcacaagaataactatggaacattggaatattgattaaaaatctgataccttacctctgtattgtgcattttataaagtgctttcctgttcattatttcatcttatgcttacatgaaaaatctgaaaaatgtgtcgatttgtatccacgtcattcacgaatatgcactgggatgtagagaatacatcctctggatttgtcgttttaagcctaaatcatggaaaacattcaatgtagttttaaagttctctaggctataggaaattaaaaatatattactcacctatcactacctttttccaggggaatatgggtgattgtggaattctgactctgaaagcattggttttggtgagatgaccaggctgccaaagtgcactgaaggtagagacttcttagtgactgggacagctgcctgttgatgccgtgcacctcctcagacctgtggtctctttgcaatttgtatgcaggcacttagaaagcactgactcgctctggcctgactgtttcggaaatgaagctaggaaaactgtgaggtcaaatttaaacctgcaaataattagctggatggcatagctgtacaaactgagatagcccgggaaatttggtaaagctttaaaactattatacttattcgcttctgttcagccaactgggctgatttttgagacagagtctcactctgtcacccaagctggagtgcaacggtgcgatctcagctcactgcaatctctgcctcctccgttccagccattcttgtgcttcggcatcccgagtagctgggactacaggtgcgtgccaccacacctggctaatttttgaatttttagtagagatgaggttttgccatgctgcccaggctggtctcgaactcctggcctcaagtgataagtgattcacctaccttggcctcccaaagtgctgggattacaggtgtgagccaccatacctggccaacataagctttcttatcagttgagaattactagaatatgtgtaattgttttcttgttttaaaaaataatagactattttttagagaagttttaggtttacagaaaaattgaatgtaaagtacagagaattcccccacacccctctgtacaatagtttttggatcaaattttggctagtcgttgtttttttttttttttttttttgagatagagtctcactctgtcacccaggctggagtgcagtggcgcaatctcagctcactgcaacctccgcctctcgagttcaagtgattctcctgcctcagcctcctgagtagctgggactacaggcacgtgccactatgcctggctaattttttgtatttttagtagagacgaggattcaccctgttagccaggatggtcttgatctcctgaccttgtgatccacctgcccccctcccaaagtgctgggattacaggcgtgagccactgcgcccggccttggctattcttaatcacccttttaagagcaagtgactgatccagtgcagttcaacagtttctaagaccttttcctccgtagtatttacaagacgatcatgagaattgtcaatcatataatttaagaatttttgcttttcctactatttaatggtatgtaatcagaagatatttatctgtgttcttcatatgaaggaagcacaaaaaaatgtcagttaaataaccacttagtaggtctctagtgggatgaacaatatttagaatcatttacaactttataccagtcttgtatcagtcttatagactgagccaggcaagaaatggggctgcccgaacttgctgttcaggaaatgccaccaaggagaaagcattgtgtgaacaatgggtctttcactgtaaagtcctgagtttggggctctggttttgtattttgtgaagtatcatcatgccttgccagagctcagtaagaatgtgaccgaaatcaggtcatgagaaagataagatttcaaacatcccctcggagctgtttgcttgacctccactgacttaattggtttctatggagttggcccctgcctagaaatactacattcctactcattttcaacttagacagctcagtctttcacaaggttgaatcttcataccattcacttttcatctctttttttttggagggggtgttattataaaatatgcatatcataaaatttaccattgtaacctttttttgtattaaaaatggcatattctctattttgcatactttaatttcagaacaaaataaacaaaaaaaaatccacaatacacaacatccaatcctgctgtcagagtagggagggaatgggggcttgacacccttgtttcctgccttcaatacaaagacaggagagaaaaaaacactagacatcagcagggggagccaggtgggacaggggcacttgaggctgcagtgggagccattttaaccatttttaagtgtacagtacagtggcattaagtatattgtgcaaccgtcaccaccatccatccccagaactttttcatcttcccaaacagaaactctgtaccccttaaacaccaactccacgttcctctcttcccccagccctgggtagcctccattcagcttttgtctatgaatttgattactctgggtaatcaagcttacataagtggaatcatattctatttgtccttttgtctggcttatttcacttagcgtacataatgtcctcaaggcttatctatgttgtagcatgtattacaatttccttccttttaaagactgaataatattccattgtatgcatagaccatattttgtttagccattcatccatcaacgggtacctgggctgtttccaccttttagctattgtgaataatgctgctgtgaacattggtgtacatgtgtattcgagtccctgctttctcttcttctggatatatacctggaagaggaatttctgcatcatgttgtaattctatgtttaattttttgagggaccaccatactgttttccatagtacctgcaccattttacattcccactgcatcttttaaaaaaataaacaaaagccttcctatatattatgtatcctacatatttggatattctcttttaaaaaataagctttaaatattatgatttgtcagttagatactcagtgaagttagatgtgtctaaagaaaaaggagaatcttcaagtagaatatagaccaaggatccatataaaaagtgaaattttacacactcacaagaaacaatactttctcatctctctagtgctaaaactatcaacgattcagctagatttagggcccaaaggaaagaaaacacataattattgtttctgggtgttgtaaatgtataactaataggttaatgtttaatggagttcgttaagtacagatttgcacagcttttctgggcagtatcacctgttggattttagaggcttaatgattaagggccccttttactgtcactgagtgtgatgctcgtgtgttttctcataataaggcatgcgaagaagggatgcaagctgtaagctcttcaccatcgctccatcaactggagcaaaaacaggtcaatgtgaggactaggagaagaggtgaaaagaagttgaatttttagccagatattctctgggactgaggcaagagcggggaagtgtgggctttggggccatgtaggagagaactctgcactcttcctacagtggagagagggatctgatcgagctggaagacactgcttggcctctttgtgttttccttctcactcatgttttggccttttagaaaaccctgtaagacccgttgcttttatctctgctctggtctcttggtgtttacaaagtcagcaccaccatctctcatgatttccaggcaccaacatccaatcctgtgaccttcagctccggtgaccctgtagctccttggtttcagtccctgggatggtctaagcgttttaaccacggtgcacaaacatctgcgtgatggccgacagccctggccaggcgcccgccggctctctcctgccatctctgcactccttcctctgtgctctgccctcagagttcccctcagtgtctttcctcacctttgctccagttacctggacatctctcatctggtttcagagataccttctcttaccttcagggaagacttccctgactatctgccttctccagagttaatgggccttcccccaacacccagacactctcacagcctccacccttctccctggtgacttggtcagcctctggctttcccaccagggcattgggtcacatagaccttccatccactgccatatttgtggcacctggcttagtccctgtgacaaagcagatgctcagttaatgatgactggacgaagcttcagtgaaaaattgttagtgggcgtcccttgtccccagtgtcctgtgtccatgtggagtgttcctttgctcacccctcccccacctgtcctcaagggaggagcagtcattgcctaactcggggacagctgactctctcccccagggcacagtgtgctcttcttttcccgtgcaggctgttctcagacgcacaggtactggcccacaggacagagcttccagggtgggtccacaagcacccactcaggctgtgatgcaggagggagtgtgtcgagcaggcctccaccgcgcccatctacatcatatcctccagttttgcttttttatggaatattgcagactgctttttccaatctccatgacagatttgtgagcctacttccacatcagaagaggaaggaagggatgccattcattgccaccactgtcccaacatgaacaaatggggaactgcattttggagaaagcctagtgtgatttcaaaggcttagatggtcctaggtgaaaacttgatagttaacggccaagggaatcgttaggagttggggaatagaaaaggtgctttttggatttcttaggtctgagaatggcctgtaactgcatttcacaagtgggtttatatcattctaggggcacttggctgtcatgtggatcttacaaggtggggaaaagaaatgaagatcctcacaaagagcatttggtgacatgcctggctgtggttttgaggctgttccagctaattttccacaaatttagcaaaatcaccaagaacacctcgtcaacttgagcaacaggaacaattatagggagaaatacatcgagactaggaagggaagacaaccttttacttgtctgttctgtttcttagataaagcagttcaacactttttgtgggggatgagggacagggtcttgctctgtcatccaggctggagtgcagtggcaccatcacggctcactgcagcctcgacctcccaggctcaagtgatcctcccacttcagcctctccatggctgggaccaaaggcatgcaccaccatgcctgcatgattttttttgtagtttttgcagagatgaggttttgccgtgttgcccaggctggtctcaaatttctgggctcaagcagtctgcccaccttggcctcccaaagtgctgggattacaggcatgagccaccacccccagcctgcacactttttaaaacaacaatactattagtcaccctcaaatggaaatggtgacacctggaccgtgggtcagcttgcggggtgggctccttttgaaatcgcttttctaattgatggaagtcagaactgcttctgacaggtgtttgaagtatttctttcctatcttcagattaccgatcatgggttactatttacgttttaaatgggctcgtatctctgtgccctctatttgtcagcaatcatctctcttactttggcttttcttcaatgtccactttaagtatctcagcatggttctgaagggagcattcctagattgtctgagacatgaattttaagaattttaaggaaagaaatctgcttgatctaaatttatcactattggcagcctgtccctcctcccctaatcaaaacaaaaagcaaaaagaaaaggagcaaaaaagagaaaagttactggacaaggacatattttgttttgttttaattttgggacatgtttattttgcacatctaatggtagcaccaaatttaaagagaaacaaatcacgttttattctgaaatgttcttctcgtttatgaagctgtttctttttgtctgttgagtatgctgctcctaaaatgagataacagttaaaactgccaactgaaatataatataaatgacatttcaagtaattgctctgagaaatgtatttaaaatgtgtattgcagacatccttccttccctctcagctccctagcatctcagtttttgctagtttttgttgccacttcacgtgctgataattgactaagtgctttcgtgattgacacgctataaaactggaagtgagccatatctgcattggtaattagcctcctattaaatcactgcttctttattcatgagtagtaagtgttaattcaaatggtcattttacatttcattctctaataatttcatgagacataaatctcacagagcacaaaatcgccactttcacagggataactcagcaatattatttatcaaatgcacttaactgttcatctaaatctcttttgtctgggaaaagtttatttccttcatgcaagagagaaaacatgccttcattcactgttcagttaccaccgtggaggcaggtaggttcttttatggagaattttcagaccggagtcatgcctggtattgagccccatagatttcctgagagcctgcggagaacagctgcactttctgtggagaggagaggcttcacttctgtctgcacatgggaagttgacctctgatgctggaaaattaggttatctgtattttttagacatctgtgcctgagatggatttaatatatttaagttaagattgaggcccacatgaacattcctgtctggattccttttcagaaagtggcgtttgatgtgtgcctactttatttatgtgacactgtttatgtgcattccagtgatcattaacaaaggctacttggtggaaaatcgtgatgaaagtggatttaaaaatggctgtatcagctgcaggtttagcaagactacattgactctgagtctagtgagaacccctgcatcatcaatttgtgttcagccaaccttaaatccagagaaaaggcagtttagtcaaccatgcaaaaaaagggcaaaagaaatattgtggactttattgggacaagggtttaatattctatatactggccaggcacagtggctcatgcctgtaatcccagcactttgggaggccgaggcaggtggatcacctgaggttaggagttcgagaccatcctggccaatgtggtgaaacctcgtctctactaaaaatacaaaaattagttgggcatggtggcaggtgcctgtaatcccagctacttgggaggctgaggcaggagaatcgcttgaacccaggaggcagaggttgcagtgagtcgagattgtgccattgcactccagcctgggcaacaagagagaaactttgtctcaaaaagaaaaaaaaaatctacatactaacagacagtccttcagtttttctacattacatataagaccaatttgtcaacacatgattggtgaattcggcctgtattaatcaggtgagactgctgtaacaagtagcaccaactggacagcttaagcaagagacattaatgtcctcacagttctggaggctgaagtctaaggtcaaggtgtcagcagagtcggtttcttctggctcatagtggcttcttctccctgagtcctcacatggtcttccctctgtactgtctgtgtcctaatctgcttttcttatgacaccagaaatattcaaatagggcccactacaatgccctcatttaacttaatcacctctttaaagagcctatcgccagatacagccatattctgagctactggaagttagaacttcaatgtatgacttttgcgggaaacagttcagcccataacagggcaaagtgaagacaaattgtatttaggttcttcatagcaccctttgcctgtttatcagacttaccactctcaggacccctagtttgtttcctggtctccagtttggggaccttgaggactattgagagattgtgggaacaatggcccagcatcctaaggaagtctttgatcaagataaaagttaagtaactcctcccttgagagcttgtcctgaagtttttcactacggctgttcttccatttagtatcattttcttatatatgactaagctctcagaataaaagctggcaaaaggttggtaaaatactggaacatggtattgaaataattatgggctgggccaggcgcggaggctcatgcctgtaatcctagcactttgggaggctgagacgggtggatcacaaggtcaggagttcaagaccagcctagccaagttggtgaaaccctgtctctactaaaaaaaaaaaattaaaaaaaattggccggacgtggtggcaagtgcctataatcccagctactcgggaggctgaggcaggagaaccgcttgagcccaggaggtggaggttgcagtgagcggagatcgcaccactgcactccaacctgggcaacagagtgagactctatctcaaaaaaaaaaaaaagaaagaaagaaagaattttgggctggatgcggtggttcacatctgtaatcacggcagtttgggaggccaaggcgggtggatcacttgagcccaagagttcaagaccagcctgggcaatatagtgagaccccgtgactatgaagaaaattgaaaaaaatcagccaggcatggtgtggcttgtctgtggttccagagatttgggaggctgaggtaggagaatctcttgagcccaggaggtcaaggctgtagtgagctgtgaccacgccattgcactccagcctgggtgatagagtgagatcctatctcaaaaaaaaaaaaaaaaaaaaagaaaagaaaagaaaagaaagaaagaaatgacactggttaaagtgaaagggtggaaaaactggattagggcttatccgttgtctcagcctgggatttctttccttttctttgcaatatatagaagtagtgcagcatagtgcttaagagtacaaactgcctgggttcaatccctgctgtatacagtttagcacctgtgagatcctgggaagattacctaacctttctgtgccccaatttcctcatctgtaatggggggaaatgacagtacttactttgtaagaagaatgttgttgtaagaattcagagttgttggggcatggtgcctcatgtctttaatcccagcagtttgagaggcatggatcatttgaggtcaggagtttcagaccagcctggccaatatggtaaaacctcatctctactaaaaatacaaaaattagctggacatggtggcgtgcaccagtaatcccagctactccggaggctgaggcaggagaatcacttgaacccaagaggcggaggttgcagtgagccaagatcatgccactgcactccagtctgggagacagagcgagacactgtctcaaaaaaaaaaaaaaattcaaagcgttaacaatcctaatgaagcacgtggtattggtactggccacagtaagtgcttcgtggcattagcattcattaatctttgtttcttgcacactctccatcgtgttcccccacctaacagaataactggaagagctgccactatgcttaacatatgaacccggtctccaggtgaatgtaggaatctttttgtttgtttgtttcttggcattacaaaaatgaaagttcagtgaccctaggtgtgtgtggacatttgggggcaggcagcacgcagggtggctgaagggctctggagttgacaccacctggtttcttttgggacctgcaactcagtagtttgtttcttgacctctctcttcatcagtttccaaatgtgtaaaatgggcacaaaaacaataatggggttgtttgggattaaatgtgatgatatatgtataaagctcttaacacgcacgtggtaaacttgttagttctttccatattcaagtgtgaaactggaagacaaagtaattacattctgtttcagatgtctttgtaaatgaccttgccttctctccctccccaatgggctgcctgatcaccctggctcatgtggcgcctctgctttgtgaagtcaagtttcacaggtgcagcagtaatggatggtcacaacccacatattgagttcaacttttatgatgcaaacatttacaaaacagttggacagtgatgagtagctatgaggatgttctccgttgtcctccttgtcaaagccccgaacacattatttcacttctgtttttttttttttggagacagtctcacactgtcgcccaggctgaagtgcagtggtgcaagctccactcactgcaagctctgcctcccgggttcacgccattctcctgcctcagcttctcgagtagctgggactacaggcgtccgccaccacgcccagctaattttttgtattttagtggagacggggtttcactgtgttagccaggatggtctcgatctcctgacctcgtgatccgcccgcctcggcctcccaaaatgctgggattacaggtgcgagccaccacgcccaggccttatttcgcttctaatgtgctttagaaacagccattgtcttcgaaaggaaagtagctcatgctcagagatagccaaaacatctgacacactgaaatcactcgcagactgaagtcgattggagaatgtttctggcaggtggaaagagtgactataatgagatagaattgttagtccttattgattctgtggaattccagaatcagggaaaagaaaaacaaagaaataaaacccaagaaaatccaggcaataagactcagtaaattaacaacttccttcccaagacatacacatatatgtgtatgtgtgtgtacgtgggtaaattttttttttttttttttttttttgagacggagtttcactctgtcacccaggctgggagtgcagtggtgcgatcttggctcactgcaacctctgcctcccgggttcaagcaattttctggcctcagcctcccaattagctgggattacaggcatgtgccactacacccagctaatttttgtatttttttagtagagatggggtttcaccatgttggccaggctggtctcgaactcctgacctcgagtgatctgcccgcctcggcctcctaaagtgctgggattccaggcatgagccaccgctcctggcctaaatttttatatatacatatatatatttacacacacacacacacacacacacacagctgacccttgaataacttgagggttgggagtgccaactcccaaggcagtcaaaaaatccatgaataacatttgacttccgtaaaagacttaactactaatagcctattattgacttgaagccttgctgataacataaacagttaccacatattttatgtgttgtatgtattgtattatgtattatatatgtatttatgtgttgtatgtttatggtatattcttaaagtaagctagagaaaagaaattgttattaaaattgtaaggaagagacaatactatatttactattcattaagtggacgtggatccatcaaggtcctcatccttgtcatcttcacattgagtaggctgaggaggaggaggaagaggggttggttttgctgtctcaggggtggcagaagcacacaaaaaaattagtttataagtggacctatgtagtttaaacccgtgttgttcaagggtcaactgtacacacacacacgtttagaggtccatttacacacatgtattgcatggctattttacaaattaaaagtactggactttggtttttaaacaaatcacccatatccatccaggttagaggaagtctgcagtcagtagcagttcacctggagaaaggcatttttgttttttgttgcttgctaccccaacctgagttagtaatctaagtttactgtcagaaaagtgaatgcttgctaaggctgaataactaaaacaggggtgtgatattttcactacgttcttgacaattcagaaaacatttagagttctctattcaattcctgggagctgcattttaaaataaagttgtgtccagagccttatgacaaggcaaggatgtcttgttaaatgatgaatgttttcaggaaaccagaatactgaggataaaaacgagagattctggaggtgatatatgatagttatgttcagatacttgaaggacagttacatgaaagtggaatccaagatcttttctgcagctccagcatgtcgaatattatgggggagcttgaatcaatgtaaaaaaaagattatctggccaggcatggtggctcaaggctgtaatccaagcactttgggaggtcaaggtgggcagaccacttgagcccaggagtttgagaccagcctaggcaacatagtgagaccctgtcacacaaaaaaatacaaagattagccaggtgtggtgctgcatgccactctggaggccgaggtgggaggatcacttgagcccaggaggttgggactgccgtgagctgatatcgtgccattgcactccagcagcctgggcaacagagtgagaccttgtctcaaaaaaaaaaaaaaaaaatcctctaatgagggagttgtcataaaacaaaaggactgtcttaggagctaatgaatttcctgtcactggaagtacttgcagaaggcctggggtttttggagaggtaattccttctcagttttagattttgggctagatatctaccagggtcccttccaaatccaggatttgtctggctagtttcctcccgctgctaatagtcatctacattcatttttttttccccccagtttgtttcctcattactctggcttttaatttttttcaattaatagacatttttggaacagttttcagtttgtagaaaaatgagcagaaagtacgaagttccatactcctcactctctcccttccctccagttgctcccactattaccatgttgcattagaatggtacatttgttatcattgatgagacaatattgatgcattattattgttgagtccatagtttacctgagggttccctcttggtgttgtacattctgtgtgtttagacaaatgtgtaatgacaagttcccaccattagagtatcatacagggtggtttcaccgccctaaaaatctcctgtgccccacctattcatccctccttccctcaccctgagacgctggcagccactgatctttttgctgtcttcatagttttgcctttgacacagtgtcatacagttggaatcatatagtatgtagccttttcagattggcttctttcacttagtaatatgcatttgtttgtttatttatttatttattatttttgagacagagtcttgctctgttgcccaggctggagtgcagtggcacgatctcggctcactacaacctccgcctcctgggttcaagcgattctcctgcctcagcctcccgagtagtcggactacaggcatgcaccaccatacctggataatttttttgtagttttagtagagatggggtttcactgtattagccaggatggtctcgatctcctgacctcatgattcactctcagtctcccaaagtgctgggattacaggcgtgagccaccatgcccagtctatctatttattttttgagacagtttctctcttgttgcccaggctggagtgcaatggttcagtctcagctcactgcaacctctgactcccaggttcaagtgattctcctgcctcagcctcaaaagtagctgggattacatgcatgcgcctccacggccggctaatttttttgtatttagtagaggtgtggtttcaccgtgttggtcaggctggtctcgaactcctgacctcagctgatctgcctgcctcggcctcccaaagtgctgggattacaggtgtgagccatggtgcccagccatttttttttttttgatacagagtctcactctgtagcccaagctggagtgcagtggtgcaatctcagctccctgtaacctctgcttctggggctcaagtgattctcgtgactcagcctcctgagtagtggggactacaggcgcctgccaccacacgcagctaatttttttgtattttagtagagatgggattttaccatgttgcccctgggtgttctcaaactcctgggctcaggcgatccaccagctttggcctcccaaagtgctgggattacagacatgaaccactgaacccggccagtaatatgcattcgaggtttcttcgtgtctttttgtggcttgagaattcatttctttttatcataatattccatggtctgcatgcaccatagcgtgtgtttctatttacctattaaaggacatcttggttgcttccaagttttggcaatggtggtgcaagttttcctgtggacctaagttttcagttcatttggttgaattcccaggagcatgattgctgagtatggtgagcatttttattactgagaatggtgagcatgtttagttttgtaagaaactgccaaactattttccaaagaggctgtacctttttacattcacaccagaaatgaatgagagttcctgttgctccacatcctccccagcatttggtgttgtcagtgttttggattttagccattctgtagatgtgtagtgggctgacttttttctcaattttagatgtgttatctccaaatcactatgaaaaatacttttaacactactattaatgtaacataacactagtatctttcaagatccaaataaagacattggaaacaagaacaagctcttatgttcatatcaatattgttaataataataatactacatatttatttgtgagtactttttgagttcattctgaaaacaaatgctactaggagattattcacaagacacatttctgattaacatgtatgagcagttatactccaaagcttcgattttggcaaccaatgtataccagttctctcaaggtgcacttttgtttttgaacagttgctactgattctattttttaaaaaaattattgtgtatatttaaggtgtacaacttgatttgatatacatatgcaatgtgaaagaatcatcacaatccagataattaatatatttatcacttcacatagttacccttttgtgtatatgatgagcatacttaagatctacccttttaataaataaatttctagtatacagtacactattgttaccatccattatatctccagaacttattcatcttgcataactgaaacttggtatgcattaaccaccatctccctattcccctctcctcgcacctcatggcagccaccattctactgtctgattctaagttcaactatcttagattctacctttaagttagatcatgcagtagctctcattctgtgcctggcttgtattgattctggattgagacttttcagtgtctttgtttcaggtctttcaagttgcatatgtcatcattaaagctgccaatgcccctcgacctggaaactggattttggagcgttctctggatggcaccacgttcagcccctggcagtattatgcagtcagcgactcagagtgtttgtctcgttacaatataactccaagacgagggccacccacctacagggctgatgatgaagtgatctgcacctcctattattccagattggtgccacttgagcatggagaggtaggtatggtgcccgctgcagcaagatctgtttcctcatcagagtctccctgtctcagactcaaaattgatctctctcaatacaaagatctttaatataactatctagctctatttaaagtggccttgagtcatgtctattataagtaatttcacaaacaatatggtttaccttgttgacttcctctcttcaaggaggctctcagtcttcactctgctgtgatttaataacgcccttggatcctccttcagagcatcttccccacagcaccagggcaagaatgtttgttgaaatattagagagctaaaatgtcccccaaagttgtagttcccttttctcagtgttctcctcggtaggtggtgagcactggagactcttgaagtcttgcagcttagtgcccaacatgcccagattgtatacacttccttgaagtcagagtataatgagaaacagcccattctttagtagcacctggcttgatgagatgaaactacaaaaattctccagtgctcttcacagcgggaactctgcagcgagctgtgagttgtttcaagggcagagattaattaagacagcctgtatcattcaggctttgtggactttttctttgttcttctcgaagcctattcataacattttaaatttgcttcagagaagttgtagcccagggacagatgctgaaatattctaaccacttggagagaaacggtcttcttaaaagattttcagcaataatgccataatgtgatgaatgccgtagtctttgttcttcacattgtagtctggttccacatctgatctttggcaagtgagggttttcttttatatcaaattttaaagtttgagacataatttacattcaggaaaacatacagattttaagtatatagtatatctgagacagtgaaatagataccttcaataaactgaagacattgagatcatggtaattcacaagtaattaacaaatgttagacatatttttacaagaagctagttgttttgttttgattttagatggtatctctaaaagattctgtcctgacattagacaatcagggctatatttttgcatgcttaaaattgacatttgtggtcaggtatggtggctcatgcctataatcccagcattttgggaggcaaggcaggcggatcacctgagttcaggagttcaagaccaacctggtgaatatagtgaaaccctgtctctactaaaaatacaaaaattagctgggcgtggtggtgcacacctatagtcccagctactcgggaggctgaggcaggagaattgcttgaacctgggaggtggaggttacagtgagccaagattgtgccactgcactccagcctggaccaaagagcgagacgccatctcaaaaaataaataaataaataaacaattgacattcatctattttgatgccttcatcttcagattcatacatcactcatcaatggcagaccaagcgctgacgatctttcacccaagttgttggaattcacttctgcacgatatattcgccttcgcttgcaacgcattagaacgctcaatgcagatctcatgacccttagccaccgggaacctaaagaactggatcctattgttaccagacgcgtgagtatgggacggcagtcctgccaaataaaataaaaagattcattttatttaaaggaactattatttttcttctttcctttttggttgttctttccccgacatgttggccttttttcttgccagcagctgtatccttatttcatgtaagattgctatgttgttacagatgctgcctttaggtgatgggccaaaatcatatccttaggtccctcacccaccccgtccccatagtgccataatgtggtgaatgccatggtctttgttcttcacatcgtagtctggttccacatctgatcttcagcaactgagaattttctttcatatcaaattttaaagtttgagacataatttacattcaggaaagcatacagattttaagtatgtagttaagtgtgtaagactggtgtcgcaaaaattttcatatcccttcaataacccaggagtgggattactaagttatagggtagctggatgtttacctttttaagaaaatgctaaacttatataaaaagtagttgtattcagctgggtgttgtggctcacgtgtgtaatcccaacactttgggaggctgaaatgggagggtcactgaagcctgggagtttgggaccagcctgggcaatagagtgagacctcaactctatttaaaaaataaaaataaaagtagttgtgtccgtttttgtagtctgaccagcaatgtgtgagagttctggctgcactacacactgttagatatttagtgctatcagtcatttttatgcccgctgttcctgtgtgcgtgtattggcattttgtgacgttaatttgtgtttctctgctgactaatgttgacaatgtgcttactagtatacgatcagattttttttgtccatttttaaattggacaaaaaataagcctccttgttactgacttataaaagaattttatatattttgtatacgaatccttcatcagatatgtatatattgcaaacatatccgttctacttggtgtttgcttattcaccttcctgtgactttggatgagcagaggttttgtgacgaatcccaatttaccattttttcttttatgattaatgctttctatgacctcaaaaaatattagcttatcccaaatttaccaagatatcatggtaggctttcttttagtagctgtatagttttagcttttacatctataattcattttgtattaatttttgtgattggtgtgagggaggagtcagagttttttttgcttttgttttttttcctatatgtatatgcaattgttctagcaccatttgttgagaatgctttacttgttttggggccgttgttgaaaactattcaaccttattattgtgggtttatttctggactctctactgttctatagatctgtttgtctattcttgtgccaataacaagctttcttggttactgtagctttacagtaggtcttgagaggtcaggtttcttgtatttccttatgaattttagaatcagtttgttaatttctgcaaaaaaaataaagcctgctaagattttcattgggattccattgattctttacaccaatttgtgaagaattttataagacattttaacaatgttgagtcatccaatctgtgcacctgatatataacttttcacttatctaaatcttctttaattctctttggcagagttttattgtttatttgaaaaggtcttgttcaataatgctcaacaatgttcaataatgaaaaaagaaggccgggcacagtggctcatgctgtaatcccagcactttgggaggctgaggcgggtggatcacgaggtcaggagatcaagaccatcctggctaacacggtgaaaccccgtctctactaaaaatacaaaaattagctgggcgtggtggcgcatgcctgtaatcccagctactcaggaggctgaggcaggagaatagcttgaacccaggaggtagaggttgcagagagctgagatcgcgccactgcactccagcctgggtgatagaccgagactctgtctcaaaaaaaaaaaaaaaaagaaatcaaggcacacatagtaagactaaactgttattatttgtagatgacatgattatgtatgtagaaaagctacaaagcaactaccagaaataacaagtgaatttagcagtgttgcagtatacaaaatcaatgaacaaaaatgaatcacatttttagtcactagcaatgaacaatggaaaatgaaatctaaaaagaagtctattaacactaacatgtaaaaacatagagaactggtgagtgcatttcttcagaggaaagcactttgttctgttaatgtgatttacatttcttgatttttgtgtggtagattaactttgcattctagggtaactcttacttgttcatgatcttttctatagagtgctgtattcaatttgccaattattttacggttttcaataatgagttttgaaacattactgacttggtttaagatgcagttggggaattcttttagacttctttgggttctgatgagctaatttgagcctaatttattttaattgagcacaggattctttgtgcatgaaatataatttttaaatgtacatgtaattatattttagattaccaataaaaactcttaaactacatgagatatttgttggtgtgccaacattttcatttcactgaaatctaggttttaatttttgttcataactttctttttccttagtattattattcaataaaggacatttctgttggaggcatgtgtatctgctatggccatgctagtagctgcccatgggatgaaactacaaaggtgagttctagtatttcacattttactaaaacttcaaaacagaaattgtagctataatatttgcattactcttttttattccaaacaaacatgaaaggtataaaattatgctccaaaaaaacagattttcagaaatttaacttgtgtcatttttaaacaatttcattttgctttggaggatatgtttctaattaagttcttacaatgatttttttatgtgataaaatatccctaacataaagtttaccatttgaaagtgtacagttcagtggccttattaattttgaagcccttctgtctgtaagaaagtaaaaaaaaaaaaaagtgcaattataaattatgtttatattttttagaagaaaggttttctcttcctattttctccccttccgttttttttggtgctaaatcaagatttaaaaggggcatggtggcttacacctgtaatcccagcactttgggaggcagaggcgggtggatcacttgaggctaggaatttgagaccagtctggccaacatggcaaaaccccatctttgctgaaaatacaaaaattagtggggcgtggtggtatgcacctatagtcccagctactcgagaggttgaggcaggagaatggcttgaactcgggaggtggaggttgcagtgagctgagatcatgctgctgcactccagcctgggtgacagagcgagactctgtctcaataaaaaaatttaaaaaaaagatttaacagtttatctcttttagcattacattaaatgaataatatgacatcttctccttttattttttaaaatttttatttatttagagacagttttgctcttgttgtccatgctggagtgcagtggtgcaatctcggctcactgcaacctccgcatcctgggttcaagggattatcttgcttcagcctcctgagtagctgggattacaggcacgtgccaccatgcccagctaattttttgtatttttagtagagatggggtttcaccatgttggccaggctggtcctggcatcttcccttttaaaacacttgcatgaagttacttcttattttcttctaatctttgtaattctttacctcttgaataggactattctgttatcgatgctgaaaaatctgtagatgaacactaagaaaattattaataggagtttctaaacccttaataagttccatgtatatttttaaaaaaagtttttattagctaagtcgtattctggttttgctttattcctcttcatttctgtttgtaaccaggttatttgtatatattggcatctaaaaattaaatgccagtttgctttgatgataatcatatatcctctgttgtgaggttcttgccacatatttgacagataggttctttttaccatgaaattaagaaacataagcagatacattttctaattcagttttggcttccttattgtgtagaaactgcagtgtcaatgtgagcataatacttgcggggagagctgtaacaggtgctgtcctgggtaccatcagcagccctggaggccgggaaccgtgtcctccggcaatacatgtgaaggtcagtatacttagaatctgaaggtcagtacagttttcctcttaatacgtcccaagtttatggtgtcttaacaacttttatagttagcaggtaacttgttttcttagaaatttaagtagtttccaaagctgcagatgaccttaaaattttaactattgtggcctaaatgtatctttatgggtttgctgttttatctatgagtcccccttcccgtatagtctattattctgtattaattttacttttgtttttgtttttttaccatgggatatgccaggttgtatattctgtattgatttggatttaagttttaaataagcaatatattcacaagattcctagatctaacaatatgtaaaagtatgtagttaaaagcatgacttccacttcatctccctccttcgcactttttattgttttctagtatgtccttcctaaaattgttatgcatataacgcatatgttaacatatccctccagccaacacagttcttacgcagaagacaatgtactatgcatgccattgtacatatcgctttttttttttttttttttttttgagatggagtctcactctgtcacctacgctggagtgcagtggcgcgatctcggctcactgcaacctctgcctcccaggttcatgcttcatgccattctcctgcctcagcctcctgagtagctgggactacaggtgcccaccaccacacccggctaatttttttgtatttttagtagagacggggtttcactgtgttagccaggatggtctccatctcttgacctcgtgatccgcccgcctcggcctcccaaagtgctgggattacaggcgtgtgccatggcgcccagcccacatcgctttttatatttaacaatgtattgtgaaattctttccatattagcaattagaaatgctgtttttaaaaacagttgcacagaattccattatacaaatgtagtataatttattaaacaaccacctatcggcggttattttgatggttattagtctgttgtccacacaaacaatggtgcagtgattaaccctgtatgtgtccttctcaagtgggcaagtacttctgcgaaatataatcccaggagatggtttgctgggtcaaatgggtatgtgcatttattattttgatattaatagctcttcccaattgtcctccataatactgcccatatcttattaaaattacttattctaggattttaatttaatctaaaatcatagaacttacttagggaggttaagagttttctttgtataaggcatgctatgtaaattaattgagatgttaaaaatattctcctagcatgtaattgtcacaataaagccaaagactgttactatgatgaaagtgttgcaaagcagaagaaaagtttgaatactgctggacagttcagaggaggaggggtttgcataaattgcttgcagaacaccatgggaatcaactgtgaaacctgtattgatggatattatagaccacacaaagtaagagtatttctttgccattgctgatcttcatcatcttccccaggtggaaaagagactttgtcaagtcttaacctctgtattggagacttttgtaatatttcatttatatccttgttatgccagtagtgtttttatatatatatttcctactctatcctgcttttcttgctcaaaataagatgtcagtcattgttatttatcttgaattcaggggtccattagctatgtaatcctgggtcataatactaactacagatgtgaaaattcagctataactaaagcagctgtctcttgcctgtaggagatgttcagccaatcttttttttttaatttttattttttgagacggagtctcgctctgtcgccaggctggagtgcagtggtgcgatctcggctcactgcaacctccacctcccgggttcaagcgattctcctgcctcagcctcccgagtagctgggattacaggcatgttccaccacacccagctaatttttgtatttttagtagagacagggtttcaccatgtcggccaggatggtctcaatcccttgaccttgtggtccgcctgccttggcctcccagagtgctgggattacagatgtgagccaccacgcctggccgtgttcagccaatctttaattgacttgatatgtagttcttacatgagtccttgtggtgtcctggttataacgtggctctgagagacagcagcgcgaggggggctggagagcagggataatagaaaaagatgacactttgctaagggtactaactactgccaccatcaaaaagatgtttgggcttcctggcttgggatcatcttatcttcctcaaacctaacccccacccccatgcacaaaatcatcgtaatagtcccatcttgagtaaaaagccaataccttcttatttatactattgccaacattgctgttatttctagtaagagaatccagggcaacctctgcctttcaggtgtctccttatgaggatgagccttgccgcccctgtaattgtgaccctgtggggtccctcagttctgtctgtattaaggatgacctccattctgacttacacaatggtaagtacttgattcacttttgtgcttgtaattgattttgtgtgtgtgtggaagatttgcacatactggaactaatggtaatagccagttggtaacatgattattgattcttttgttcaccaagtacgtatcaagcacctactatgtgtcaggcagtttttgaggacctgggaatgtgtacttaacaaggtagtcaaagtccttgctcacaaaaacactaaacaaacaggtacatgggtaatataatgccaggtcgagaggtagtgtcatggacataaagcaaaattaggactcatgaatggagggagatggggtaatgaggtgacaatgttggggtgatgaaatgacatttgagcagataattgagcatttggtgaaggaagaaataaggcccagtttaaagccatgcgtggaacacagtaaatagcaattgctctccttagcttttagaagacatttggagggcttttgcataaatcatctcacagatcaagcaagtcctcccattaacttggtaaatgtcagagttctctttccgtttcaaaaactggcaaattgacttgcaaataccagagtctcctgaataggttgcgtctgttcaaagactcttgtgaccccatcaagttctcagccactggcagttaaaatggatatcgaccagtagggatgggtgggccccccagcgatggggagggtaaattacccaactgaattgattcttacgtgcacctggtgaggggatgatgacgatgataataatgaagatgatgatggtgatagtggtggtgacatttaccctcaattgagttcatttaaaaaaatatatcatttaaactttgcaaccatagcagatagaaattacttaacccactttgctgtagctcagagcagtcaagaaggttaactgcctgaaggtttcaaaactgacattaaaagcaaagatagtgcttgctgctctctgccacttgcctctgtgcttttttttttttacaaaacagttttataatttacaacgatacagttctcccatttgaagtctacaattcattgttttggtgtattggtgcaaccatcaccacaatctaagagtcgaacattttcatcatcccataaagaagccccttacaaactagctgtcacttcttactttcctccagccccttctcccggcccctggcaatcgttaattacctttttctttgcagatttacctattctgaacttagaaatggaaccatatatgttggtttttggtgactggcttctttcatttagtataatgttttcaaggtcatccgtgttgtaccatgtatcagtatttcaaccctttttattaccaaataatatttcatagtatggacataccatgtttcatatatccattcatcagttgatgaacatttgaattgtttctactttggggccattatgaacaatgctactagggacttttgtgggtgtatgttttcattattttattgggtgtttacttaggagtgcagttgctggatcttatggcaactctataacttaacattttgaagaagtgtcaaaaggttttccaaagtcactctaccattttatattcccagctccctccacgggtttcatctctgttttctttctttaaacaaggaattggcaaactatggcccatgggccaaatccagcacactgtctgttcttatgaataaagttttattggaatggagatatagccatttgcctgtgtattctctatggctgtgttcgaacaataatggctgagctgagcagctgcaaatgagactctgaggccaaaaagcctaaaatagataccctctgaccctttacagaaaacatttgccaacccctgctttaaacctcttttgccttcatgttgggtcattgccattgttgtctttctagggaagcagccaggtcagtgcccatgtaaggaaggttatacaggagaaaaatgtgatcgctgccaacttggctataaggattacccgacctgtgtctcctgtgggtgcaacccagtgggcagtgccagtgatgagccctgcacagggccctgtgtttgtaaggtaagtggggaggtcagagacacccctgagcttcctttgagcttctctggaaaaggagtgttttccattggctccaatgatcagttcttgagcaaagtggtaaggtttaagcagaactccccttgccccttctctccaagccacaccgagttggctgtattatatatgcttggactcacatgggcatctggcttctttttttgtacctctggtaatggtgatatattccagaggcatttctgtgacttcttagaggacaccaaacactgcatacctttatattcccacctcctctgtgggcctcatctctgttttctttctttaaaccaggacttggtaaactatggctcgtgggccaaatctgacacactgcctgttttgtgaataaagttttattggaacagagctgtatccatttgcttatgtattttctatgactatgttcaaccaataaaggctgagttgagtagttgcaaaagagatgctgttgacccctagcttaattctatggtattcttttccagctttgtattcggaagagaaccagattaacattaaatttctgagaacaccaattaaacgcagatatgctattttgagtgtctgttaaaaaggagttgaatagtcataagaaatgcattaatatggtgccagtgaggggttttatttggccttacaatattaataacaatttcttcataattcataggacattccattgtacctatgtgcttattcccacctgtgcagtcttaggcacatgttatatactactggaaataatcttgagcatttatgaataagagaaaattctatagctctcttcagattttgaaatgctggaaagatcagtaaaaaaatgaaaaatttaaaacaaaacaaaacaatttaaatggaatgaccgagttctaagatctccagccttgttcttgagtacaaaatcaaattatatataattcaaaatctctattctggaaatattgactttatgaggcctcacctttactttggacgtttattcacctgtctctgtggatcaccgaacacctatcttgttaatgtcattttattctctctggacagacacattggtttcaaaagctaatcttttaccctaacttacaggaaaacgttgaggggaaggcctgtgatcgctgcaagccaggattctataacttgaaggaaaaaaacccccggggctgctccgagtgcttctgctttggcgtttctgatgtctgcagcagcctctcttggcctgttggtcaggtgggaggcgccatctgcgcggcgggatttaatgagcaggtcgtattgcacaagcttggcacgagctgtgtgaggaggaaatgaggatgacttcccgtgacaccactctcatcgctatgcaatgatactgacgtgggtcaaaggcagccgtctgcctctcaagattctttataggtcatgtgcttactcccacacacatttctctatggaaaaaacaggatgatgtggcactagagaacacgtcttgtttcaatttcttctgtggggaaatggattgggtggggaggtcggctctccctccgcccgcccctgctgctctcaggcctgggagcccagagggccgtggggccatggggattttccagctcaaagacgctaaggagtaggaggccctccagtggcgagggtgggaacagcggcacgtggtgcagggtttaggaatgcaggccaagttgtttccggaacagggagttctggggtgatgggttcaacaggggtgtccagtggtggctaggagaggtggagatggtgtgatggctgcaggcaagggaggagctgctcggtagggacttacccagcagtgactgctgtggacaccacgctggggggagtaccatcacctctatgtcggtgacgcattgggagtataagatctagaggttatctttgtacatttttcaacatttgggtaaaaagcagggggcaacgaagaagagggagtcagacttagcaagagacattttgctgaatgcatttatgatgttctttgttgttttaaatctaaaatctatacccatggcctttatggttttgctcatttatttgcttatactggatctggatttggagtagtgagacttgttctcaggtcctcctggtcctttacaagtggaagggtcaagggtcatgaggttcagcagccacaggtgttatgttaatgccatccctagagaagctttctggcccatttcttcattgtgaaaatattactgctgcactgggtgaaatctaaggtaagttctatttcatacttcaaaattcttgaatttgtttttaaggtaaacagtatgtccgggtggctggtcaccgacttgatcagtcccaggaagatcccgtctcagcaagatgcactaggcgggcgccatcaggtcagcatcaacaacaccgcggtcatgcagagactggctcccaagtactactgggcagcccccgaggcctaccttggaaataaggtgcgtgtgaccctgcaggtagcgatgtctcagatgaagatctcagggaacactgagaaagaacttgcgctgcctgcattttaggtagtctcatagggcacctgagtgttggacagcatttcatagcctgtacttgcatctgatgatacaaagaaggttttctagccttgttagactttatgttgtattattcaaataagaacttctgctcttctggtctggttcctgagcagtgtgtttggtgaagtctcatccccgtctctgagataaactttctgggtccctggatcacttgtttatgaagtgttcctcacattcccgctttgtttagtttgccataggctcagcttagagcctccatggcttagtggagggcctggcatacaagaaacaacccagggaaggttccagcaatgggactgctgtgctgctccctcactttgagtaccgtggcaggctgtgctcatctgaagctcacatttaggaacagatggaatactttctgcttttgttatatttcaagaaaatgcaaactggtgattctgcaatgtggaggttggtttgtaggcttgggccttccttgcaatgatgtgttcccattcccccctccccacttatgccgcatctctccagattctgattgatacgaaaatttattcccgagaatgcatctcaattattatagctccctgcttaccttcccgggtttttggttttgttttgttttaaagtaatggcatacaggcatgctagtgtagtcttgtagcttggtacgcttctatttaatttgatgatattttcattttaaaacttgttttgtatatttttaaggagtatttatttttgaaaattatttttttctcaaattataatcctagaacatgtgctctattgatatgattttatcaacagagttcaatgatttttttttctcttgatatcacttctccaattttatggtgcaaagttgggttctgaacaatatattgctgtcatatacccatcagaaagaaaatcttaattttatattgaaggacatctaatcagaagaaacacctttagtcctttctctaactagcaaatcagacatattctttgttgtcctatgaggaggatgctgaaatgaaaatgtggagattgtagacatgggtcaaactcctcatcccctaaattacttaaccgaagtaaatatctattgtgtgattaacaaaagtttatagtaatttgccttgtggtctctaacaaagagtacatttttcttctgtgctttcaaacagtgtcctgcatgttggtaatattgattaaccaaaatgtttatgaatatactcccctttcactgcctttaatgtgaatttccttgtctgtcatggtcaaggggatagttgtagcctagttgtttgcagatggatcccagtgaccacttcctcttacttgattgttgctgtgattgtcttcccctttcgtgttcattctcgcttaaacatttcagctgactgcgtttggcggattcctgaaatacacggtgtcctacgatattccggtagagacggtagacagtaacctcatgtcgcatgctgacgtcatcattaaggtgattgtttttgctttgattctgctatagagcttagggcttagtgggctgatagtttatgactgaaagttactaggtgaggacatcccagcaaggagctggtggccaggtggccattcagtagaccctggacttgcgtggggactactgagatggtgagtgtgagaatctgtctttgagcccatttctggagttgcctcaggacagcacccgccactcttctcttcatctccagggtgtacccatcttttcacatttaaaaagaaagggagctgggcttggtggctcatgcttataatgtaagtgctttgggaggctgagacaggaggattgtttgaagccaggagtttgagaccagtctgggcaacatagtgagacccccgtctctcaaaaaatattagccaggcaccgtggcacgtgcctgtaatcccaggtactcgggagggtgaggcaggaggatggcttgagcccaggagttcaaggttatagtgagctgtgattgcaccactgcactccaacctgggtgacagagagagagcctatctcaaaaaaaaaaaaattttaagtaaaaaggagacaaatttttgctctgaccttgaatcttctttttgaagtctcttcttccctgtgccactttgcctctcagatgaatggattaggcagtacttggcggtctgaggacagtagacgtgttgccatacttgtcctcagcctctgtccctatccccacatcctcagtctccataaaaagatccagctcagtcaggaggactccccaagtggtaatgtcccagggtctggggcatgtctgggcagaaaccactccaggttcttgtctctcatgtcctttcacctggagctatcttcacctccatctccagcctgaccaattgcagaccgcacacggtaaatcacttttgtgaacagcaacttgatgaaaagctggagctatgtttacatactttttctacttctgtactttagttaaagattagaggtgtcagatgggttgctttgataaaagctgtgggcaactgcacgactttctttcttttccaagatcccagcgaagtacacaggctttcagtttattaccagaacccctctaaaaataatacaatgaaacaccttttctctgataattctgggccaagagctgtacacaccattacacgtttgccacaagaagctaggcacgaatgaaaaaccacgttgctgaatacaaaatttgattttatttttattttatcattaaattgaatgacaaatatattttctcttgtttttaaatgttagggaaacggactcactttaagcacacaggctgagggtctgtcattgcagccttatgaagagtacctaaacgtggttagacttgtgcctgaaaacttccaagattttcacagcaaaaggcagattgatcgtgaccagctgatgactgtccttgccaatgtgacacatcttttgatcagagccaactacaattctgcaaaaatggctctttacaggtatgtattgaaaatggaggaaaaacttacggtgaaggtacttccattttatgtttgtttattcatatatatttaaagctcaacgtattttacattcattatattaaggacacagctacaggatctggctgtcttaagaattattaagtttataaatgtaattttattgaaaacgtaagaacagttatccacatcaagtgtatccagtagaagacagacttgacattaggatgagaaactttcaaagggggtttctgggaaatgcacgatgagttagcgattgtctggaccatgttgcacctggttctcaccatcctaatgttaatggtcttagcttttactcagtccatttaagtgaacgtatccatcgttggtcatttgattactttcgggaggacaatttctggcaatgccgtgccaagcataaaagttgtatgcagctaggctgggcatggtggctcacacctgtaatcccagcactttgggaggccgaggcaggtggattgcatgaggtcaggagtttgagaccagcctggccaacatggtgaaaccccatctctactaaaaatacaaaaaattagccaggcatggtggcgcatgcctgtagtcccagctattcaggaggctgaggcatgagaatcatttgaacccaggaggtgcacgttgcagtgagctgaggttaaggcactgcactccagctggggcagcacaacgagactttgtctcaaaaaaaaaaagttgtatgcatctaacacaaacatagcatgacacatttaagggtaatctttctatttgtgataattgaatggattaatttttctgaggtgcttcaactccaaataggcaacaccagacctttcccacagtcatctatgggcagcagcatgactttgtaccaaacattgaaggcatttccagggaataatgatggctcccagataatatattgttgtgaaagacctttagttatttacaaaaatcacatcacccttttattggatttaagtctttttttttttttttgagacagagtctccctctatcacccaggctggagtgcagtggcgtgatctcagctcactgcaagctctgcctcccaggatcaagcgattctcctgcctcagcctcctgagtagctgggactacaggcacatgccaccacgcccggctaattttgtatttttaatagtttcaccatattagccaggatggtctcgatctcttgacctcgtgatccacccaccttggcctcccaaagtgctgggattacaggcgtgagccactgcgcccggccggatttaaatcttttaggagcccatcttcattgagatgtgagatgtatttgcgagcgtgtgagtcacataacaatctgtctatttgtaggttggagtccgtctctctggacatagccagctctaatgccatcgacctggtggtggccgctgatgtggagcactgtgaatgtccgcaaggctacacagggacctcctgtgaggtgacgcttctctcttcctgtctttttcctttcgttccttcctaaggggaaaacagtgcactgaaggggatgtcatggcaaacatttgatttttagctttagcagcccaatgtttggctcagtcttttttgggcaatagaaatattagaagtcacattgtttaaaaaaatcagattcctccaccaggaatgggctggagcaccggacaatattctgacttagtgctgccctcttgccttagtcaacaagaaacttgcaatactcatgccattgactgtgtttctaaggaggatggaacttgatcatatctgaacatttacaaatcaccagcatgtgacctgggtagctttagacaagccagccctattttgagaccttttatggcccctcgctattttactttggtgggctccaccttacatgtgaaatatatgaaaatgcgcttggaatcctcaatgaaagtaatctgttgctaaaaatattttgaaatcacttggacaaacatattgatattaataccataacaagaataggccgtaagactcattgcacaaccattacgtttttgtgtgtgtgtttctacctttaaaaagaaataaggaactggattatggtgatggttgcacagctcggtaaggtttttactaaaagtcattgaattgtacacttaaaatgggtgaattgtgtagcatgtaaatgatacctcagttaagatgtttaagaaaaaagacatttctgtactctggcaactgagcagtttctgtttgtaacgtagtggaaagaggatgactttcccttctcttgcagtcgtgcctctctggctattaccgcgtggatggaatactctttggaggaatttgtcaaccctgtgaatgccacggccatgcagctgagtgtaatgttcacggcgtttgcattgtgagtctctcactgtagttcaggtgccctctcctcctcaattcagagccatttgctgtgtacaagtgatttttttttaagtgcttcctccacggaataaccctagcctcatagaccccaaagaaaatttacagatttaagctcatgtcatgaaatgtttcccgtttttttttttgttttttttttgaaaaaagttactttggtaatagtggaaaagggatatacaacttcattatagttctttttattagattaatataaagtaattgtttttatttgctgagactataaagcaatagaaaggtaaaaaaatgttgtctacttattaaatacaaagcataggatctttagatgacagtgctaatatttatttatttatttatttgagacagggtcttaccttgtcacccaggctggagtgtggtggcaccaacactgcttactgcagccctggatcttctgggctcaaatggtcctcccacctcaaccctccaagtagctgaggccacagacaatgctagtattttttttaaatcatgatattacataatataccctaagaagaagaataaagtataatcacactcacttatataccatgctttatagttagttgggataaattaatcaaacaggtacttctttcatgcaatatgagttgaaatagggcttaagaaataggtagttaatcttgagaatgaactttggggcaggtgtggggcaagacttgtttcttaacttcaatcaggaattcttctaggccctatgccctgaagccaggccacactctggggtctcatgggtttgatcctcagaggtggagtgactgcatatgctgatcagctgtaccctggtcgcctggcagggaaatgttcatgctttttccaaaagagattgactgagtcacagagttagggaaaattaattaccagacccagggagaagatcttagaatgatgtccaggatggcttatgtccaggatggcttagaacttaatttttctttattctgtaagtaaaacttttgttttgccctttgttctgtaagtaaagcttctgtaggaattgcatgaaggggtggtttacgggcagactcagtccctccaggattgctttcctcaggtgcacagcttccaaccgcttgatgaggtggttgctttttttttcacctcctttcctttgccatttgggtttgcaaggcctcctgccagcatttggggtggggtggggtggggggtacagcaggctgtggttctgccacttatgtcttttgtagctaggctgaaagagtagatttctcatgcttccattaatgtatgtttacaaatatatattcacattaaagtgataatgctaaatagcaactggccttaaagctttaattttaataaataataattttatagctttaaacatgttttggaaataattttagacttacagaagagctatgaaagagttacagaagtacagagagttctgaagtaaccttcccccagcatcccctaatgctaccatcttgcataactagagtggagttatcagaatgaagaagtagcacgataagatgaactacaccccacattctgatttcatcagtttttcactcatgctccttttttttgtaggatcgaacccaggaccccacaccattcagtgactttgcctttttagtctcctctcctctaggaaagttcctcagacttccttgtccttcatgactatgacacttttgaagagcactgagcattctgtggaatgtcccccagccagggcttgtctgatgctttcttatgactaggttgaggttacacatttttgaccagaagacgtggaggtgccgtgccctctcattgagagcagatggataggatatcattgtgtcttcttcctggggatcttaatctgggtcacttgaattaggtgatgtctgctaggtttttccactctgaagttactatttctcccttcttaattaatgtttgagagggcaaaaataataaaaatttaaattagaatttaaggaaatacaaaaaacgtggtagcatcatatatctgttaaatctaaccttgctggtttttttttttctaatatattgtaaaaacaagcttgaattcttccttttgtgtagttgttcatagccctgggccttgcgtataactatctagcttccaggagttaattctttattcacagttcattagagatgaggttccagttgctcttagagcccctgtttttctctctgagctctcttagctctttattcaaaggagaagtctgtgtattttccttgcagcttggcatgatttagaaaagagaatggcatcacagtaaattgtgcatgtcttgggccctcatgtctttcttttttcaatcgaaagatgtttttcctccccaaggagaggaatagtctcattccttcacataccagattcaccaacagggacagtcaggtaaagggctggtggcacacgcctgaaaaagcactgaaacagaccctcagtgggtttttcaacagaactacatactagtttccccaaagagaaagaaagcactatctgactccttgatcaaagaaaacataccatagacatgttccaaatgagcattatcaaatatttttaaaatgaaattgcagttactctgcagaatacttttagctcaaccatgtaaccctttactaagaccagttgcatcttgaattaatttggattcattatcaaacccaaggtcctatgaaggatgggaaggaaaaaagggtctaagactctgttgtctgaggaccagcagtgtgggcatcacctgggagcttgctagaagtgcagaaactcaggccccacctcagatcccctgaaccagagtctacaggtaacccaggtgcacttattaatagattcatattccagtttagatgctctggtctaggataaccctaagtaaaactgatgaaaccctggagtaaaatggatgtaatacaaatgcttacaattccaaattaaatgtggtatatgggaaaactttcatcaacctgaggaatgatggaaatgtatatggtttagaaactgaaaatactaaattgctagatgaaaaatgaccaatgaaagtatgtaaaatgagtggccgtaggagaaggggacacggggaaatgggagctgaggtgcacaccaagaggagcagcgacacacgtgtgcagaacaagccccgctcccttcgagcccgtagctgcccgggggtcagtgctgcctggtcctggccccagtgccgacctccgcacccctcccctttgctcctgcacacctcctaaccaccgactgcactttcttttagaatgttttaaatgagggggggaaggtttttcatattttttcatgtatgtaccatttccagtgctcttcattcgctggtataaatctatgatttcgtctagtaggtatcacctttctacagcctggattgttagcctttctgtagtgcagatctgctggttgacagattctcttaactctcctttatctgaaaaaggcttgccttcagttttgaaattgatttttacagatttctctttcagtactttaatattgttctgttgccttgtggcttacatggcttcaagtgagaagttagttggtggtcatctgcttatttctgtgtgttattctgccttttttctctgcctgctgttaggagggtctctgtgtccctgggtttgaacactttgactgtgccttggtgtgtatttctttatgctggggtttattgagcttctagaatttgtgagtttgtagctatcaacttatgaaaagttttgaccaaatagcttttcagcttcccacgccaatctaattgcacgtgacattgatccacagatgatagaggctgggatcttttgttttttcctgaagtttgagtttctgttgttgtcttcaaattcactagtcttttctcctacaatgtcgaagccgatgcccacccattcagtacttcattttggatatggtagcttctagttctagaagttctacttggtcctactttatatcttgcatttctcttttcacagtttttatgtttccttcaagtctttgagcatgcttataatagcttttttgtttttgttttgagatggagtctctctctgttgcccaggctggagtgcagtcacgtgatcttggctcactgcaacctctgcctcccaggttcatgcaattctcccacctcagcctcctaagtagctgggattacaggtgcacaccaccacgcccggctaatttttgtatttttagtagagatggggtttctccctgttggccaggctggtctcgaactcctgacctcaggtggtccacccgccttggcctaccaaagtgctgggattacaggcgtgaaccaccgcgcctggcctataacagtgttttaaaagcctgccaattccatcatctctatgatttgtggacatgtttctaatgactgggttttgttttttttttcccctgattgtggatcgcttttttttgttgttgttgttgtttctcatgtctagttattttcattccccataaaaaaaaacccagctctttatttggaaataattaggagtttacccaagatttgtaagaataagagtggtacgtagaacacctgccatttatctagactcccgtgttgttgccattttccccatttgccttattaatatcattatctgtctacctatctaattatagtatgtttttctaaactccttgagaatagtttgcatagacaatggccattttggtgtgtatattgcaagaataaggcttgtctcttgtataaccatagtacacttatcaacttaagtcaatgtaacgctggtactctactttttctaacctaccacctgttgctcagttttgtcagttgacccaattatgtcctgtatagcatccttccctccagcacaggcccccatctaggatcagatgttgaattttattgttgtgtctccttaggcttttaacaggaaatgtttctactgcctttctttgtattttatgctattggcattttgaataatataatcttttttttttttttttgagacggagtctcgctgtcacccaggcagtggcgccatctcagctgactacaagctccatctcccaggttcacgccattctgcctcagcctcccaggtagctgggactacaggcgcccgccaccaagcccagctaattttttgtatttttagtagagatggggtttcaccgtgttagccagggttgtgttgatctcctgacctcgcaatccacctgccttggcctcccaaagtgctgggattacaggcatgagccaccgcacctggccgaatatgatcatttttttaaaaaaatacaatgtccttggttctgggcccttcttttgtttctcttggattattcaggccggaatactttgtcaaggatgagtctctcagagcactgccaatgggagtcccagtgtctgtctggccctcactggtgatattaattctgattacacaggcaaggtgttggtcaatttttccactatatatgaacgattctttccttttgcaactaaaaaacagttggaggcggacactgtgagaccacgtgcatatcccactcttcatcagaattccccttagaggtagcagtcggaaggttctggccgaagcagcacttgctgtcatgtttgcaaaagcttgatcctccatctcctgcccttgtccatgctcatcagtcagagagaaagctctcagatttctcatttatacaaattacacttgctgatattaatctgaaaacaggaggccttcctcatatagctcagaggttggtgactggttttagcattttgtcttttttttttccgcttggacttcaagttgcttatagataaatctgaaaatcctttaagacaacctgagctgattcttctggtgcatgttcctaggcgtgtgcgcacaacaccaccggcgtccactgtgagcagtgcttgcccggcttctacggggagccttcccgagggacacctggggactgccagccctgcgcctgccctctcaccatagcctccaacaagtaagcctcggacctcatcagcggttcctgccagcatggccaggattcccacccagatgcgtactaatgacttcagagcaagactgtgtgtgtaatacgtgtgtgaattttgcccagtgacaattgatttggattaaagacagaggggtgggttattttcttgtaaaccaacgtttggcttatgaaagcaggcaagaagaggtgtgtgccagcaaggacctatacacgccgttttccctcttgattcctcttggtcatcagttgtttcacaagtatatgttgtctacttaccagtgggctaggaggtggagggatacagagaggaataaaacattgtccctcgacttagggagtttttgatctaatgaccaaaatatgtacgcatgaggctaaacaagagcagtctaaatccattcattgattcaacagatatttatggagtgcctactgtgtcctgagttttacagcaggtgttctgaatagcaaactgttctcacctggccgtgggccccaggggactcagtgtggtcgtgactgtagtgaggcctgtccaccagatggtggggaggagggagagcagtgtccagcctacctaggtgggtgcaggaagctcttctctcagatttgcaggagaaggagtttcacaggcagcatagacgggcgttctaggcagatggagctgggcgtgccatggcatggcagcaggaacaggcatcgcccatttgaggaactgcagcaggccatggaacagaaggcatggagggaggtggaaggagatgtaccaggcaaggtcttatagtcacactggggcaagtgcatcccacaggccagcagcttaaaagcctctgtctctcgctggtttaacctttagaactcttccttcacccactctcaaagaattcccagtatataaaaaggatgcagtcagggttactcatgatgaaattgggggtgggtactgtcatccaccctgcacaggatcctcaaggtttaggaatagggttggaaggggcatccgttagcagggggtccctggagaggtgcgagagcctcctgaccactttgtgtttgagtgagctcacttttgccctggtatgggcagtgctctgaggtgggaagtcagtgccagggaacccgagctggggaacccagcatcctaggagcacccgagcaggcctcctggaggaagcatcagctgagttgggcactggggctgagctgggttaacccaggcagacagcgagagaagcaggcgcgctgtgggctgagaatgagaggagtagggagcagggagtgaggagtgagtgtcagtgcctggatcatgggaccaggagtctgtgaggggttgagactcacagggtgggctgggtgaccagaggccccggattctgagctaaggaggtctcattgaaggtctggaagcacaggagtagtagaaatgaagcattttaaatagttagaaattcggcttcatccattggaaaattttgttcatttctaatgttttgacagtttcagccccacctgccacctcaatgatggagatgaagtggtctgtgactggtgtgccccgggctactcaggagcttggtgtgagaggtactctgcatccactggcttcaacacattttcgaaattaaatataaattctatgtgtttatttttaaatgcgtagttaagtgtggttttggagttttgatgcataattgttatttcatagaatcattgagaaaaatcagtatttcatgttttaaaattaatgttaaaccttactgggaatttttaaagaacggtactcttttcctggctaatctgagttctcatcaagaacaataggccgggtttggtggcccacacatgtaatgccaggactttgggaggctgaggcaggtggatcacctgaggttaggagttcgagaccagcctgaccaacgtggtaaaaccctgtctctacaaaaagaaaaaaaaaacaaaaggccgggcatgacggcgggtgcctgtaatcctagctacttgggaggctgaggcaggagaatcacttgaacctgggaggtggaggttgcagtgagtggagattgcgccattgcactccagcctaggagacagagtgagactctatctcaaaaaacaaaacaaaacaaaaacaataggaagcagcaaggagtcggtatctgtggttcacacatttgaatattccattgctccgggctgttctggagatgacaggtggtttgctttagtagccgtcttctggctcctgaaggccagtgctgtctttcctatgtgtgcgtctcagtgcccagctctggctgagcctgcaggaggctgtgcggcatccggagtggtcaggggtgggtcagagttggccctggaaacaggtgcatgtcccctggatttatgcctcattttggatgctctcccccttcaccgcgacaggtgaaggagatctgggaatgcccgagtggggagtcatatccctttcacagtaaatctcagggaacagagtccgtctgatttattagccattcagggagtccctggatagtgcggtaaggccttaagtaactgcatttgtctgatcccactttcaatctttgatacagatgtgcagatggttactatggaaacccaacagtgcctggcgaatcttgtgttccctgtgactgcagcggcaacgtggacccctcggaggctggtcactgtgactcagtcaccggggagtgcctgaagtgcctggggaacacagatggcgcccactgtgaaaggtgtgctgacgggttctatggggacgctgtgacagccaagaactgccgcggtgagtgcgtgagcgtgaagtcaggtcagctgtttattgccataggaagtcttcaaccgtatagtcacatgtgtcacacagggccccgcctaggaggtcacactctcttgaggggttacttgcattaatgctgggtctctgatcaaatacagacccacgacccagttcttccctagctaccctatcctgagcttggttagtcataacccataggggtcagtggcctggaaagatgcagcctgccacccgagcggccagtgtgacttgacagagttccggctctgctccccgtgactgaaatgaaagtggggaagctcagagcctgtcacattcgtaagggagatgcttcagaggctgcacgaggcagatgggattccaagatgaagggtgggaaatggtaagactgtaaccccagaaactgcgtaaagcaccgtgtggtgcatcttagccctctgtgccagaactgcccgacccctatggcactctgctgaattcgatccttgaaattatggatcgtggagaaaactagattctcctgcacagcagatgacctggccggagggatgattcagccctcagattttgaaggagtgaaagaacaaaagtggcaattataaattattttgagtatttcatataaacgccagtcatactatggtactacgacatggggacacaagagggcaccagctgtacagaaaacatactttcccaggcacacgtggagagattggaaatgttttatggccctgggccaatcaagctgatctccagcaggtggccaccttgactggctatcataccaggataattatgataacagcatttctacaaggcttcacgatttgtagaatgtttttatcattttcatgtcatttcttttcatcattactgcaagccttggtgattcattcctccgttcattcattgtttattaagtgtccggtatttcccagacactgtactaagaactgcgacaggtagttgggaaattgtgattcaagtctactgggaagctacacatgatgatggtatggggggaaaacatacctgtggatccaggtgttggagtctcgactaatgtgagttttattccaggaccaactgtgtgacattgggctaatttattagcctctctgagccactattttgttattcataaaatagacataattatatgtgtatatcaaggcctttctgagaagtcagtgcggtaacatttaaagttctagacatgaaataaatggcagctattataattactagtaataaaccaattattattatattttctaatatataatatatataatataatataatatattattatattatataatatatattatataatataatatattattatattttcactccactgctgtccaacagaaatacaatgtaaaccacccatgtaatttaaaattttttagtagtcacatttttcaatagtaaaaagaagtaggtgaaatgtattttaataatacattctatctgagctgatatattaaaaataagcattttgtcatgtgatcaggttttaaaagtattaagcaatatttactttcttttttagtactgagtcatcaaaattgagtgtatattttatagcccagctcaattaggatgctacattttcctcagaaatacttgatctacatgtagattacagaaaatttacaattgaaaaggtagttcaaacatatttaaaatttttccgtcctgtaccaaaaattattttctttaatattggcatccacattgacaaaaccgcttcagtatttaaatttaaactcagagatttggttcttcgcttgcatcagccacatctccagcatttggtagacatgtgtggttagcggccacaggacaggactgtgaaggtcaaggcgatgaatgactgtcgggggttgcacttgaaggcacggaggcgggcaggcccatcagcccagggtggcccgggctgcctcctgaagggggtgctgttcatctgagacctgaaggatgggaagaagagccccaagaagagtgaccagcgtgggaagacgggcccaggcaagtaggcaggccctgcccgaggtagacactggagagagagtgaccagaatggaaaagacagagacagggaggggaggtctcgggctgataggtgggaagcagccacgtcggaagggtctcctgtgcagtgttgaggtgctgaggtcacctcgtcctccctgtcctgggactcaccagcaacttgtgcagacatggagtgggccagggtgtgattggagctgtgtgtttgaatatcgccctgctgccagcgttgaggagggaatggctgccaggggtgttgggttaggagacaagacccgaaatgaatctttctggtaagcattgatgagggcttcaggtagggcctttgccatggagataaaagagaagacgtaaaataggtcttgatgacaggttggaaggtggaggaaggacggttagagcagctggggtttgggtctgggcctgggctagtagggctgatgctgaccaggctgtctctggtttctgaacacttaacagcttttatcctttctcatcccttctctcgcatcccctcgcttcgatgagacaaagtcctgtgaactgtttctgcatatcccacgagcagtccttccatttctataacagggttccctctgtggacttcttgtagggccccccattcttatataatactatagtctgttaggttaaaccaagtgcaagtgccggtgttgtgtgtgattgaccttctctaaagcaagcgcgtatagttcaacccagtatttatctgtttcccctcaccccccataactctcactcacttgaagcttggtaggaggagaaactgatcgtcaggttcacctcctgcctctgctgtggggcagcggctgcagccggaggtgtggacaggccgtccaggtagagtagagcactgagggagatgagggtggtgagaaacctcacagaactctaatattaaaggactcttatattaaataagttaaatgaggataatttttatattgtgagctactcctgagaattaaaatatatataaagtacctggctattcagtaattggcctaaaataacactattttaaattagtactatttataacataaatactattttaattaagaattactataataggccgggcatggtggttcacacctgtaatctcagcactttgggaggctgaggcaggtggatcacctaaggtcaggagttcgagaccagcctgcccaacatggcaaaaccccatctctactaaaaatacaaaaattagctgggcgtggtggtgagtgcctgtaatcctagctacttgggaggctgaggtgggaggatcacttgagcctgggaggcggaggtggcagtgaactgagattgcgccacggcactccagcctgggtgacggagtgagaccctgtctcaaaaaaaaaaaaaaaaaaaaaaaaagaattaccataataattattactgcagagagagaactagtaatagcagtgtgacctatggaaagttatctaatctttccaagttgtagatttcacaccgaaaatagagaacattatttcgcctccctccttggtttgtggtgaaagtacaaagaaatactgaatgtgacaggcacagactaacagacacatcatacagtgaatatgattttttaaattatcatcaatagtttacattgatcatacttgcattgaactttaaatattccccagagaaagaggcggcttgaaatgaaacacggaggggagacacacgagaaacaagagggagggcaggagagtgggcgtcccaaataccacaggaagagggcgatgcaaaagggagagggaggtcacggggtcccttccgcagagccacggggtaagagggggaccgaagtctgctccctgaatttggtgcctgggaaatctctggagactttagggagaacagttgcagcagacaaggggccaggaggacactatgcgaaacttggattggacggacgtgccagggaggtggatgttctgatggaggataaaagggagggggtgtcttgtgtttgatgggggcagtggagaaggatgtgctggggagttagcagcagagtccgcacggtccagctacggggttgatggagcaagtccctgaagggcaccggtgaatggggcctctcgtgggactgcagcattaaggcccccactccaggaaaacagacggccagcctggcctagatcatgaaggaggcggatcccagcacgtttcctctgcccctgaccttcccatgtcatgtcccatgtccagcactcttgctgcagcctccaggtcgtgtttaggccttccattatttgtgaagtttttctctcttttttcttacattgttatgtcatgacacacactgtacatgttctgagtccacacatttataaagagtgcctgggggcccggcgcggtggctcacgcctgtaatcccagcactttggaaggccgaggcgggcagatcacaaggtcaggagatcgagaccatcctggctaacacggtgaaaccctgtctctactaaaaatacaaaaaattagccaggcgtggtggcaggcgcctgtagtcccagctactcgggaggctgaggcaggagaatggcatgaacccgaaaggcggagcttgcagtgagctgagatcacgccactgcactccagcctgggtgacagagtgacactccgtctcaaaaaaaaaaaaaagagtacctggaatattttgtcaggcaacatattaaatgttcttttttttttttttttttttttgagatggagtttcacacttgtcgctcaggctagaatgcagtggtgtgatcttggctcactgcaacctccgcctcccaggttcacgagattctcctgcctcagcctcccaagtagctgggattacaggcacgtgccaccacgcctggctaatttttgtatttttagtagagatggggtttcaccacgttggccaggctggtcttgaacgcctgatctcaggtgatccgccttccttgtcctcccaaagtgctgggattacaggcatgagccactgcgcacagccaacatattaaatattctaactgaagtgcttattaagggttcccctgtgaatattgattaaatatattttggacccgtaagattgtatcactttgcaaaggtagggaactttgtagctttaagcatcaatgttgtaactgtagataaaatggaaccatctgacctgaaactacaaatgactcatgacttagaactgggatatcatatttaatgaaaagatatttttcattaaattatgaaatataatattaatatgtacttatttagattacgttttaactgagctttaaaatattgaatatgtacctgattggaatcagggcaaatggctaagttgattttgaaatctccattgcatgtttttcatgggaatttgtagctcatttaaaatatgtcgaggaagtcatgaaattggtgaagcgaattcgctaattattgtcttaatagcttcaatgtgtttttcctgtgatggatccttccactaaccctgtttcagtttactcttcagaaaaatgctaaacttctaaagttattgccaataatattatttttagttttgtgatttgaaacattgaaagtttacattttttttttcctttggggatgacggatcttatgataaccatcctcagaagtgagggttaatatgtctttgtgtgcatgtgtttagcctgtgaatgccatgtgaaaggctcccattctgccgtgtgccatcttgagaccgggctctgtgactgcaaaccaaacgtgactggacagcagtgtgaccagtgcttggtaagatgcatgtgactaattgacaccttagccttggtacagaggcgattgaatccatgactcagaaggagctaagtccccaagtgtattagtttgttctcacactgctatagagatactacccaagactggggaatttatcaacaaaggaggtttgattgactcacagtttcgcatggttggggaggcctcaggaaacttacaatcatggtggaaggggaagcaggcaccttctttacaaggcagcaggagagagtaactgtcaacacttataaaatcatcagatctcatgagaattcactatcaccagaacagcatggggagctgcccctatgatcaaatcacctctctcctttgacacatggggattacaattcgatttgagatttgggtggggacacagagtcaaaccatgtcataaagtgtggctgacaagtgccgtgcctgtctagagagtggatgtttgctataaagggatggggatggtgtcatgaatactttatgattctatgaaataccctgtgtgtgttctggaacatactaatatgaggagtcatttattaaaacgtatgttggtttccactttctccccctttggtgaaacagcatggctattatgggctggactcaggccatggctgccggccctgcaactgcagcgtggcaggctccgtgtcagatggctgcacggatgaaggccagtgtcactgtgtcccaggtgtggcagggaaaaggtgtgacaggtgtgcccatggcttctacgcctaccaggatggtagctgtacacgtaagccttgatttccttgtttgagactttgtagtcattcccagagctttccttgggccctccctctacttccaactaattttggttaagtgcctttactttttctcttctttccctggaggatttcataccttttttctggtttctggtccctatcagggtacaagcctaagttttggtcatggctctgccgcctactaattgtgggagcttagattcattacttaactttgcttggcctcagtttcctcatctgtaaaatggggatgctaatgagaatctgcattgagaagttagtgtaagtgttctatataaagtcctcagcatggcattgggcctgcagtaagtgcttagtaaatattggctccctctgtgatcacctagtgagggctttttcactcttttctctatttcccctgtcctgtccccatttccccgcttccctcagcatctcctgagatggagggccggctacctccatgagacatggaggggtcttgggaattgtgaggcgtcttttaggagtgagaagagtggcttggactcttaataaaagggaaataacagcatcagctcttagccctttaatgacatcacccagatctgtaacccagcattcatctttatttcagcctgtgactgcccacacactcagaatacctgcgacccagaaactggagagtgtgtctgcccccctcacacacagggtgtgaagtgtgaagaatgtgaggatgggcactggggctacgatgcggaggtggggtgccaggtgagcactgtcatccacgctcttgcttaactgagagttgctttgctgtagcaagtttcaggcctgttcttctatatattttctggactttaatctgttgaatagctttgtgaatttaaaaaaaaaaaaaaaactcaatgtgggccaggcacagtggctcacacctgtaatcactgcactttgggagactgaggcaggaggatcgtttgaagccaggaattcaagaccagcctgggcaacaaagcaagaccctgtctttgcaaaaaataacgattaaaaaaaaatttagcctggtgtggtggcacacgcctgtggtctcagctacttgggagactgaggcaggaggatcacttgagcctagggattcaaggctgtagtgagctgtgatggcaacactgcacttcagcctgaacaacagagaaagactctatcttaaaaatcaaaaacaaaaacaatacaccttaatgcagatgataggaatcaaagtggaagacaggacacccttaagacaccttattctaggttttcttcaagaacctagttgttgcattgatggttagaaaatccaaaaaatggctgggtgcggtggctcacgcctgtcatcccagcactttgggagaccgaggtgggcagatcacaaggtcaggagattgagaccatcctggctaacacggtgaaaccccgtctctactaaaaatacaaaaaaaattagctgggcgtggtgatgggcgcctgtagtcccagctactcaggaggctgaggcaggagaacgacgtgaacccgggaggcggagcttgcagtgagccgatatcgggccactgcattccagcctgggcaacagagcaagactctgtctcagaaaaaaaagaaaagaaaagaaaatccaaaaaatatttgagtgtcctttaataaatattgtgcaatgtatactatcttccaagagaaagtaataaatcactttattgggggtttatgtccaaaccatgaggcctccagttttctatgtagccttcttcagttaaatttgggtatagtttgtgttttggaaacaagaggaaattactttttttttttttttaattgagacaggatcttactctgtcacccaggctggagtgcagtgacaccatcaaagctcactgtatcctcaaagctcactgtatccttgacctcttgggctcaagcaatcctcccgcttcaggcccccaagtggctgggactacaggcatgtgctatcacgcccagctaattttttgattatttgtagagacgggggtctcactatgttgtccaggctggtctcaaactcctgggctcaagtgatcttcccacctctgtatcccaaagtgccataattgcaggcgtgaaccactgtgcctggcctgatttctacagtaatttcgttagacttgttttgacctagtagatttaatttcagttcacaattctggccccgtgcgcatgtgccactaagatgcacagatttccggcaacacaatgcctgtctcctgttggcacatggcaacgtgaatccatgcagcaatagcaagagagagatggttcatttgtagaacttccccacatgtagtgttttcctgtaattcaaatatgtgtgcatttggaagcatcaaatctgcctttttaattgagttggttttcccttctctcaggcctgcaattgcagtctcgtggggtcgactcatcatcggtgcgatgtggtcaccggccattgccagtgcaagtcaaaatttggtggccgggcctgcgatcagtgttccttgggttacagagactttcccgactgtgttccctgtgactgtgacctgagggggacgtcgggggacgcctgcaacctggagcagggtctctgcggctgtgtggaggaaaccggggcctgcccttgcaaggtatttaccatccatcctcctctttcatcctgtctctggctcctcatcatgactcctgggctttgactacttacctaagcagccaggttttggatgcttttcctagtgagttcacactcccttccgcatctgagttcaaagtctcttatgctcctctagagtgacggatgatttttgaaattgaatttttactgttactagtgtcagttgatggaactgatttgaaaactgccctgaagttttaatcatatatcccagaggctgagtggctgcgtatcttgagtatgcaggtgaggtgggtttctcagggcttcgggatttgtgatgtgatccctgtgaggttattgggctcccgtatgtgctggccacattgaaggaaatcggggtttattattttcccaagaggtaagacttcaatgtcattataagttttgtgtgtttccgttagttttcccaatgtgctttgctattaggaggtcagagccacctcctctggtccttttcccatgggtggtgagatgggagccctctggcttgatgatggtaatgagctgatgggtgactggagataggaaggaaaactcatgtacatatcatggcctgggagtaatggaagcatcagtctccccgttttcggccttatttatttatttagagacagagtcttgctctgtctctcaggctggagtgcagtggcacaatctcggctcactgcaacctccgcctcccgggttcaagcaattctcctgcctcagcctcccgagtagctgggactagaggtgcccaccaccacgcctggctaaatttttgtatttttggtagagacggggtttcaccatattggccaggctggtctcgaactcctgacctcaggtgatccctctgcctcaacctcccaaagtgctgggattacaggtgtgaaccaccgtgcccagactctgccacatcttatgataacagctgtgatgatagacgagtagagcagcaggccttgtcttaataatcacctgggccaagcacggtggctcatacctgtaatcccagcactttggaaggctgaggtgggtgaatcacttgaggtcaggagttcgagaccagcctggccaacatggcgaaaccccatctctactaaaaatacaaaattagctgggcatggtggcaggcgcctgtagtcccagctactcgggaggctgaggcaggagaatcgcttgaacccggggggtggaggttgcagtgagccaagattgtgccactgcactccagcctgggtgacagagcgagactctgtcttaaataataataataataataataatataataataataataataatatttatcacctggccggtggctctcacacccagggatcatcagaatcacctggagactcgaggcggcttccagagttgtctcgggacattctcatcagggactctgtattttccaaacacttccaagatgattctgttaatcatctgtgtttgagaatcactgattggatctttgagaaaactgacactcagaaagctccgggcctggctagaggaaactaatgtttgtgcatctataattatgtttaaaattatgtttgtgctctattttgtctctgtttgttcagaaatcacatctcttttttaggcaaaaacgagtcctttatttgctcccctgtaggaaaatgtctttggtcctcagtgcaacgaatgtcgagagggcaccttcgctctccgcgcagacaaccccctgggctgcagcccgtgcttctgctccgggctgtcccacctctgctcagagctggaggactacgtgaggaccccagtaagtcacacacagcgaaagtgttctgcttctaaccccactcccctgggaggtgggtgggggtgggaaacacagccaagtgttcacattaaattttgctcttatggcatccaaaattctaggaagctaatttgggttagaacaggaatcagagctcagcttctgctggccgaggaagtaaatggagcttgaactaaaggctgtccatgttgttccttagctaatctatgaaaagctttcattggagagaagatagaactgcaaaatctcagccgtcttctgcatatcattgaacgtttccccagcgtagcaacagtttggccctaaatggcagtagtttaaagcactttcagttcattttcttccagatgtttagtttaaaggaaaagtctttactgtttctgttttaataatgaagctgtttcatctgtgaaacaatgatggaatctaaagaatgaaactggagtggaaagttcgcattttgaagtgcactttcccctcctttcgtggtttaggtaacgctgggctccgatcagcctcttctgcgtgtggtttctcagagtaacttgaggggcacgaccgagggggtttactaccaggcccccgacttcctgctggatgccgccaccgtccggcagcacatccgtgcagagccgttttactggcggctgccgcagcagttccaaggagaccaggtgaggtgcacgcccagccgagagccagtcggtgcttcctaggatatacagaaattgtttaaaatcaccatagtctgggccggcctgtcatttaaagaagtagttattaatttcctcttttaagtgggatcagagaagtttaatgctcataaaagtctcctcaaatatatggttccttaaaatttttcattaattttaaaagttttttaagttcacgttatattaatttggttcttcctaaagcagtcattcaacagacatatacagtcatgtgtcacttaacaatggagagacattctaggggaatgtgtcattaggtgcgaaagttattattataatctcatgagaccatggtcgtatatgtggtttgtcattgactgaaatatcattacgtggtatgggacccactgtgtttactgatatgctcttggtacaaacctaggtgctatggcctgggagtcccttttcaagaaattatcactcatttggggggaaaaaactactataaaagatcatgaaaggcatcacttggatttttgtttatataaacattggagtctgtgtgtgaattcaccctgatctttacaatttgcaaatatgcacccagtgctcctggagatagagaaatttttaatctaaaggagcttgaaaataatttgcatcactaccacattgatttgttattttggagctcacttttgtttgttttctcgaaaggaactatataacttaggtcaacttaataatccataattaaatggaattagaaggaagcaaattccagacaacaaatttcacccatgtgatgtatttttaagatacaagatttctctcttatggtggcagtcttgcaataaaatgtttttgaatgaaagctttgtcagagaagtaaacaacactttattatttgatagctcatggcctatggtggcaaactgaagtacagcgtggccttctattctttggatggcgtcggcacctccaattttgagcctcaagttctcatcaaaggtggtcggatcagaaagcaagtcatttacatggatgcaccagccccagagaatggagtgagacaggaacaagaagtagcaatgagagaggtgataatgggatcttttcatagaagttccttaaagacattgactttgctatggatgtagtgaaagatgaaagccattaataagagaatgagcagccaggtacggtggctcacacctgtaatcccaccactttgagaagccgaggtgggtggatcacctgaggtcaggagtttgagaccagcctgtccaacatgatgaatccccgtctctactaaaaatataaaaattagccaggcatggtggcacacacctgtagtcccagctacttgggaggctgaggcaggagaatctcttgaacccaggaggcggaggttgcagtgagccgagattgtgccactgtactccagcttgtgcgacagagagaccgagcaagaagaccctgggatcaaaattccagtgagattagcaagatctccaaaaacagtttgaatttcaaattctcaagaaatgtatattagttttatgtcaatttagtgggcactgcatcttaaattctttatcttggcgtactattttcaacctgcatagagatagtggtacaggagactttggacttgctcagatttgggaagtgtttattcttccagcagatgtttactggatgtttgctgtgtggctggcactgccttaggtaatgcatatctattgataatggaactgacactgcgcctgtccatggaggtttcaggaggtctttgtcagttacactcagtggcatgcacagaacatggctcatttctggagaaatttataaaagaatttattctttataagttttatgcctgtcagaatttggcctctgagcttaattgaatgtgtttctcattctacagaatttttggaaatattttaactctgtttctgaaaaacctgtcacgcgagaggattttatgtctgtcctcagcgatattgagtacatcctcatcaaggcatcgtatggtcaaggattacagcagagcaggtacttggagcttctagaattttgaccgttattttcatatttgaaagcaaactgaaagaatttgactcacttcacttccattacctactatttttattaatccatgtagttcagttccttaccaaaacattgttaaatattaatatcattatggaatgtgcgaattataacttaaagtatccacctagcatgctaatgtcgatataaaatataaggacataatgttggaatcttagctgaagataaaatgcaaaaaaaacaattgctgtttctgcacatgaaaactgaaatgcccatgtcttcgtagtgatgtataaagaatgctgtcacctactcatctcatactttagcccaaaaagaaagccattaggtcttggccaaatcagcacttcaagaggtcttttaggtgtacttgtgtcacattatttttaaattctaaaatgtctaaagtgtgtcatgacagttagtaatgtgctttaacacacttcacttacaatcacaagcaggaactactccaaacagggaagaaagctctggtttcatatatatgcaagtgttaggtcatgtgctatgtttctagaaagtttttcaaatgttagcgtttcctctcttaacatgatggctgcacagaatctcagacatttcaatggaggttggcagaaaggctgaaaagctgcacccagaagaagaggttgcatctcttttagagaattgtgtctgtcctcctggcactgtgggattctcatgtcaggtacggagactctagtcgaaatctatttcctgggtttgagttgaaatgtgcttgttacagcaactcccagagatgaacagaacttatgtgtatctactatatcatttttttctctttttgaattaaaaagaaattaattttggtaaaatgtacataacaaaatcttccatcttaaccattcttcagggtacagtttagttgtgttaagtacagtcacgttgttgtacaactgtcaccactatcatcctcagaactttttatcatccgaaacgcaaactctgcactcattaaacactagctccccatttcctctctccccagtgccccaaaaccaccattctccttttggtctctatgtatttgaccactctatggccctcttatatgatatatatatatgcatggcacatgcctgtaatcccagctactcaggaggctgaggcaggagaatcacttgaacctgggaggtgaaggctgcagtgagccgagatcgtgccattgcactccagcctgagtgacagagagatactccgtctcaaaaataaataaataaataaataaataaataaataaaagtggagtaatacagaacttgtctttttgcgaatggcttgtttcacttagcataatgtcctcaaggctcatccatgttgtagcatgtgtcagaatttccctcctttttaaggctgaataatattccattgtacatacatgccacattttgcttattcgttaatctgtcagtgaataaacttgggtggcttccccatcttggctattgtgaataatgccgctatgaacataggggttcaaatatctctttgagattctgcttccagttcttttggttgtgtacccaaaagtggacttgcagaatcatatggtacttgtattttccatctttggagggatggaaatggtatagctactggtttttcctgtgccattttccattctcaccagcagtatacaaggtccagtttctcaccaatacttgttagttttttttttttttttgatagttgataccctaacaggtgtgcggtggcatcaccttgtgttttttcatttgcatttctctgatagagatgtcgaacttcttttcacatacctgttggccatttgtatgtctcctttggagaagtgtctattcaagtccttcactcactcattaatcagacttttttgtcctcccttttgcaccccctcaggactgcgcccctgggtaccacagagggaagctcccagcagggagtgacaggggaccacgccctctggttgctccttgtgttccctgcagttgcaacaaccacagtgacacctgtgaccccaacaccgggaagtgtctggtatgctggtttgtgggggtgcttgcctgagtttagaagtaaagtggacgctgagtgtcagatttccggtctaagtcatagccgtgccttggtttagtgagaggttaaatttagctaaatataaaatataaacctatttccttgaggacggcatagcttagtggttctgaccttatcagtggaaattcttttataaattttcctttcttgatgaatttatctgtgggcatcaatttgggaattatagtcgtgcaccaaataatgacattttcatcaacaacagatcacatataggacagtggtctgataagactataatactgtgtttttactgtaccttttctatgttagttatagttagatgcacaaatatttcctgttgtgttgcaactgcctacagtattcagtacggtaacatgctggacaggtttgtggcccaggagcaataggctctaccatatggcctaggcgtgtagtaggctgtgccatctaggtttgtataagtgcactctatgacgttcacaccgtgacgaaatcagctagggatgcatttctcaggcagtatccccatctttaagtgatggatgactgtagttgcatgccttgtttttaattgcagtactggttgccgtagtcaaaatagatgagaactgtatacgatgaagtttgggggctcacgtgggaattttaaaataagttaatgccagtgttgaaaatgtatttctctgtgtaaagtattgccctctccttgcattttttaaaaaaatgcatattctctaggggatgataacagcacattattcacatgttagtgtgtgtttgcttctcagccaccttctcctaggccaagattggtctcggggacacatggagagctctgaccactgtaaacgactaagcggcccagacagaagcctcgcagccctgaccgaggacaaattcctgtgtccatgatttagcttaagccaatgaggcagataacaaaataatgtgatattcgtttcctactcctgaagcctcatgctttacagtcactcaggtggaaacattgattactaattgttccaagattaactcgccttgggtaaaataatgcattgaagggaaatgagctgcccaccaaggacacacccgaagcctcggagatcctgggtgtggcccaatcacaaggaaacactggagccaaaacagaggaattaggactgcaggctcccaacctgcctcccgccacattttgattctggttttccctctttttgacaattcctgtcactgaaacccattataaacaaaaaatggtgtctgggcttggaggatgggatttcagggttgcagtggtccttctattcttgtcagagtcccttcacatttttttattattattatttttttcaagatggaggcttgctctgtcacccaggctggagtacaatggcgcagtcagctcactgcaacatctgcctcttggcttcaagcaattctcctgctcagcctcctgagtagctgagattacaggcgcctgccaccacacccagctaatttttgtatttttagtagaggcagggtttcaccatgttggccaggctggtttcgaactcctgacctccaatgatccacctgccttggcctcccaaggtgctgggattacaggcatgagccatcacgcccggctgtcccttcagatattaagtctgaactatagcagccatgccaggcagtaatttagtgtacattttacacacctgcaacaatggggagctcactcccaaaacagctctgctcatctttgggcagctctgattctttctaagccagtgcccctgaccatgcatctgttggtgcagttttattctttggagctgttgagataaaccatgagttcagattattcatgaaaagtgatgggatcttaacagataccttgtgaaactacttgatcaaatccctctttcccatgtccaaaggccctgaatcttcagccctccaagtcacgtaccctcacatgcctggaggccagatggagtggtcgtgggtccgttcaccagcctgtggtgtgcatgtcactgtctgtcttcggtatcctgccctgagcctaacgcctttgctcccagagtcagtgggagcttccctccttaactcgaggtgctgtgtctccatggcccagcctggacagggtagtcatacctgccctgtcactgctgcctcacggcattgactagacacaagacccttgaactcttcccatcaatatagcgcctcagtcccttcttccttgctctttgagctcaggaccttcccttccatcctcagtttttcaaatccttttgtggtttagtgcagttcatttcccttcaacataatctcctaagcactccccctgtgcttattgtacaggtagatatgaagacctttttggatctgattttgtcattagtatataggatgttcaggtcactgagcatttggtgttatcataaaaatgattggggccgggcgcagtggctcacgcctgtaataccaacactttgggaggccaaggtgggcggatcacctggggctgggagtttgagaccagcctgaccaacatggagaaaccccatctctactaaaaatacaaaattagccaggcgtggtggctcatgcatgtaatcccagctgctcgggaggctggggcagaagaatcacttgaacccaggaggcagaggttgcggtgagctgagatcgccccattacactccagcctgggcaacaggagcgaaactccacctcaaaaaaaaaagtgattgattggaagtatgccttggaaggggctggggagactgaggacaagggcggtagcctgggagctcctcgtcctggttacccactccctaccaccgccttctgggagatacgactgaacctttttacatcagtgaaatattggcaggcattctctgtgaatttcccatagcaactaattcagcccacactttggttctcattagggggtccttgtttccctgccactcttggggcagcttgtctttgcttctctagggagcccacagtctgtcgtaagtcagagggagttggtgttagccatggaaaacctgaaaatcttcaattctctctcatcatctaatatttattccttgtcaggtttaggccatgccattaacacttttacttttcaagagagagattacaaattttacttctacagagagatgagtttgagaggtcaggtagatcccagtaaaatttatcctcatcagggaaaaaaataggaatagaactttaaaatgaaaaatactagaattttaaaaacatttaaatgaacttaaaatagtcctttttaacatgtaacaagatgtctttctgtatcacctctcactgccaaggataaaagtgtgagtcagcctgggagtttgctcaggtgttcctcactgatcctggaaacctattcagctgcatcagacatggaatcttgtgcccagtggctgagtaaatagagatgaattgagcaaatgccaatttcaaattggaatcagatggcaagaactgcttgttcttttagctttaaaaatgtgtacctttttggccgggcacggtggctcacgcctgtaatcccagcactttgggaggccgaggcgggcagatcacaaggtcaggagatcgagaccatcctggctaacacagtgaaatcctgtctctactaaaaataaaaataaaaataaaattagccggttgtggtggtgggcacctgtagtcccggctactcgggaggctgaggcaggagaatggcgtgaacccgggaggtggagctcacagtgagccgagataatgcctctgcactctggcctgggtgacagagcgagactctgtctcaaaaaaaaaaaaacaaccaaaataagtgtaccttttttaatagcaagaccgtaggtccaaaggatgatataaaatttaactggaaatgccacatggggtggctcgtgcatgtcgtcccagctacttaggaggccaaggcaggaggatcacctgaggccaggagtttgagaccagcctgggcaacatagcaagaccccctacctgtacaaaaaagttaaaagttagacaaacatggtggcgtgtgcctctggtcccagctactcgagaggctgaggcaggagaatcacttgagcctgggaggtcaaagctacagtgagctatgattgcaccactgcactctagcctgggcaacacagggagacctcgtccttaaaaaaaaaaaagaaagaaaaaaattaactggaagttagttgttggttgcagtaatctatcagtggtgctctaaaaccatgagttttcttccctcattgtctatttcctaaatcatctatccattcttcaactccttacatgtggttgttgaaccctgactgtgtgcaaaactggtgcttcaaattgttttttggggcactaaatattttaaatctgtgttttaaggttctgcaaactgcttttagggctcctatgtctattttccttaagaagaatgtactagtaatttcttggctgtagtggatgaatgcagccttaggatgaatgaaagccacagagcgggaaatgttttcaggattttaagaatatggaggaaaatgctcccctttcctgaagaatatttttaaaagctagctgatataaaacgtggcagtgcttagctattaccagataagaatgatttctaacaatttcccattttttcccccttcctttaaatgtgggctcccagaactgtggcgataacacagcaggtgaccattgtgatgtgtgtacttctggctactacgggaaggtgactggctcagcaagtgactgtgctctgtgtgcctgtcctcacagccctcctgccaggtgagtccccacaggggcagctggcatgctgggctgcccagggctgcttccagttcagcctcattttcaagggtctctgagtggtctgttgttaatgaatattctccattggttgcaaaaggctaattttaagaaaaggtgttcattctcaaaagcattggaagagaatcttttcaaaagcaaagtatctgttttggtattggatgtttggatggaagcaattaaagaaaggacttttaggttttgttttttaagactcattttagcccacagcatatgtatccaatctgcatggagataaattgctattaattttattgataatgatacaaaagaacccaattaccatttaagggaatggggttagagtttatataagggaatggggttagagtttatataagctggtgcctaagtgctgaaataccacatggtgataaaattgggactagtttctaccttgtacttatgatgcttgtacagaattacctgaatgcaaaagggaaccagaaattttaagtgggaattagaatatcaaagaatcctctttggatcaaatgaaaattataactcatcaataatattttattattgcttagaatatttggcaaggtattgaacatacaaagatcaaatgttaactcttggtatactgcaatgaagtattccttttaatatttgtctgaatcttctgttttttattgcctccaagtaaatgatgcctgatggtgagtaccaaatgagaggcactatgtacacttcccttgcaagctatgaagcatcctaaaatttgttgttactagtgcttattttttatattaaatgtatatatataaattttgacttgtcaattccacttctgtagtctgtgctatagaaatacttgcatgtgtgtgtaaagatggatgtgtttttgcattgctttttactcatgaggaatagggggaaaacggaaatatctacttacggggaattgattatatacattgtgttacattcctagagtgaaatattttacaaacacggagaaaagaataaggtatatctgtaggcacagaattggagaaatggccaattgaagtatgtaattgaatatggagtgtgatgccattttggaaaaaattcatatccacgtctattcatacccatattataggtggctatatatgtgcccagagaagtattgggaaggacattctaccctactactttgcacgtttctgtgctgtttgaatattttacttctgcaatcataaaaaggttataaacatccccaaagtccgcattaataaattaaagtttgtgctatcaggaagagattgtcaggttgtgaacattcttgtgtgctctgaatctcagatgccctaaaacacacgctttattttctacatattttgtttccactgaagtctatccctttactattttaaggaggaaaaagagtcggaagtggtatggggctgataactgacgctggaaacttcatcttgctaacgaaaaggaaccagacttggctctaactggttttgttttttattgttgtctccagtagtttgcatgcacccagctcagcctctagatggcacattggtaatttaaaacgtgaaggcagagggtagaggatgttgagaaaaaggagtaaaacaaaagcagaaatccatgaatgaggagatcaaatcccagtcgatgattaaactttgagaggctctgtcattttgcttatggcagcctaccacataactccctgcctgcctttaggtgcatccgttctccagttctgccttatttccttgcctttgcctccctggctttccttcctcgcctttcgttacagtcaataaagttcttttcgtcagcgtgtgttcagccatcttccctctgctgtttttcatgcttgctcatagttgtttcagctctcttaccaccttatcacttagtaagcaaagaccctttttccttgggacactctcttgttgggtggccaattagtgataatccctaaggtcagtcttcttccacttaacattcacatgattgtccctggacagggtcttatgaatgtcttttggatacaagatgtgtgtgcacttactgattacttttattttccttctttttgccaggtagattgtaagctctaaaaagctatgtgtaatcacataactttgagaccagtatggtgtatcctaagagtaatgaataagtaccttaaggaaagatggaaattgtatatctgaaaattcaaaaagaaattcttttcctccagttttagtcccacttgtgtcttggaaggggaccacgatttccgttgtgacgcctgtctcctgggctatgaaggaaaacactgtgaaaggtacatgggtggattgtcatgtggaaatccctgggcactctgtttcttttataaggtattgggcatatttactatagtaatctgggagccattatcaattatcagtttggatgtgcttgattgaaataagacctcattactgttccagaacaagttttcccaaggtgaatggatctgtgctttgcatttcatttggcggaaatgattactgtcgcaagttagaagctggtattgaccatcctgtctgcacctatgtcccttcctttctgtaggtgctcctcaagctattatgggaaccctcaaacaccaggtggcagttgccagaagtgtgactgcaacccgcacggctctgtccacggtgactgtgaccgcacatctgggcagtgcgtttgcaggctgggggcctcggggctccggtgcgatgagtgtgaaccgaggcacattctgatggaaacagattgtgtttgtgagtatttctcctctaaatgtgtaaagatggtttttcctcccaaatgtgtcgggaaagaagtggtgacggcacgctaaagtgtctgcagaataaaaacatcctattttattttcattttcttattttctaagcatagatcactgttgcatctgctgaactgaacctttcatcatgtgttttccagctgaggcaggaggttctaagatagcagtttattcctctggcactcagagcagcacagtgatttcaactttctcctttagtggcattaatatttcctttagtggagccaggagtgatttagtgcaggagaggaaacagctttgtggggttgtcatttgtgttaccccaatttcatgatagcttccactcgtgactatcatggacttaaaaaaaaaacaaaaacaaaaaaatggagtcttgctctgtcccccaggctggagtgcagtagcacaatctcggcttattgcaacctccgcctcctggactcaagtgattcctctgcctcagcctcccgagtagctgggatcacaggtgtccaccaccttgcctggctaatttttgtatttttagtagagacagggtttcaccatgttggccaggctggtcttgaactcctgacctcaggcaatccgcctgccttggcctcccaaaattctgggattacaggcatgaaccaccatgcccggcctgtcgtgggcttttgtaaactttttttccagttctgatttattctaccagcaagtgcatgagatagtcagcttgggatgtcttctcaggggttaatggggaagatagggaggcctgttaggaccatggcattggaggtcttttttgctttgacttttgtgtgggttataagcacaaacacccccactattctctccagtgtccttcacttgtacttgtgaaagatgcatttgcaaactgcctgaggaggtgacagagcaggctgtggaagggaatgctgggattcagtgcagtgggtcctagttaaagatgagccaggcagcataaagatgggggcagaagaatgaaatgtgtgccataactccctgcctgtctttaggtgcatccgttctccagttctgccttacttccttgcctttgcttccctggcttgccttcctcgcctttcattacagtcaataaagttcttttcgtcagcgtgtgttcacccctcttccccctgctgtttttcatgcttgctcatagttgtttcaactctcttaccaccttatcacttagtaagcaaagacccttttgcttactgggcgccactcttggcctcagctgtttctttctgtgtgacctctgggaagttacttatctgatctgagtcttggcgtcatcattgaataggggcctagcacttcctgccgtgccacccatggcacagttggagtgagaatgagatcagatgtggtgcacggggtcttggagtgtactctgaccgcatgtgtcattttcacaaaacaacttgcgcaactccatgaaaaaatgggcagaccacatcgcattaactttaactctcctttttaaaaatttgtcttgtagcctgtgatgatgagtgtgtaggtgtgctgctgaatgacttggatgagattggtgatgccgttctttctctgaacctcactggcattatccctgtcccatatggaattttgtcaaacctggaaaatacaactaaatatctccaggtaggtactggaaatacagagatgaacagacacttgtatcattaagggatatagtcattgggaatggtgggagtcattccatgtgtcctccccacattgtgagagcccaacttccatcagcccctgcgggcaggtgtccagtctttccttgactgtgaccagtgacaggcacttacttacttatctcacacgctagcttgtttcacggtgggacagctctcatcatttcagtgctctctggaggactcctcatcaatgctgccctctgtggccctcattctgccttttgggataaggccaagtccacttgctcttctgtaagacaactttgggtatttgcaaacagctgccctattagaaaagcagaaaataggccaggcacggtggctcacacctgtaatcccagcatcccagcactttggggggccaaggcgggtggatcacgaggtcaagagatcgagaccatcctggccaacgtggtgaaaccccatctctaccaaaaatacaaaaattagctggatgtggtggcgcgtgcctgtagtcccagctacctgggaggctgaggcaggagaattgcttgaacctgggaggtggaggttgcagtgagccgagatcacaccactgcactccagcctggcgacagagcaagactccatctcagaaaaagaaaaagaaaaagaaaaagagaagaaaagcagaaaataaatctgaacagtatcttctttaaggtatattatttttaaagtgtattattcttcactgcactaaagttgcagggcacaaaatctctcctccctggaaggctacattaaatgtctggcagtaaatcatagttttatgttttcatcaacagagcctgggtcaaaaaagggtgaggagttaagaaattaacttagtagacagcatcctactatagcacttatttatttttattatcttatttatttattttattatttttttgagacagggtctccctcagtcacccaggttggcatgcagtggcgcagtcatggcccactgcagccttaacctccatagctcaagggatcctcctgccttagcctcccaagtagctgagactacaggcacacaccaccatgcctggctagttcttttatttttatttttaatagagatgagctctcactatgttgtgcaggctggtcttgaactcctaagctcaagagaacctcccaccttgacctctcaaatttctgggattataggcatgagctaccacgcccgacctacttttaattctaattggaaaacagtgtgattcttaaattttgctttatatatgcgttagaatttgacataatctatgcagtgcaccaggtagcaataaaagggatggccattcctaaatgccttttcttagataagagttttcctcaaacttaggacttccttaggtgtgtgcgtgtgtttatgtgtgcgctgggatggggctggttcttgaatccgtcttgatttgcagtggtcttttctctataatggtagttcagaaaggttagggacctctaagagatgtttttatgttatactttcctcaaacgtcacaaagtgtttttgaaaaatgagagcttttacctctataaaaaaaagaatatttaacttttttttccaatcactatatacacgatcagtataatatctgccagtcttggtcccagggatataactattttatatatatcaaataagacaaatatttgatttaaattttaactcattttgaatgatttgctctaaataaaccacttgtccgttttctttaaataactttttgtgtttatgtaaagtattcatcaagttttaaggttgaaataaaattatacaagaaattagaaggctgttggcataaattaagcactttatttttctttatttttagtatttataaagtctttctttattgaattcttttgtagtttagcctaaaaggcatttttttcttaggtgttgcaattatagttaaatttgtgtgactctgctattgagataaagccagacttttatctgagaattgcagcagtatcagattctgctgaacacaacagattttaaatttatatctatatcagaaatataatgcaaaggatggcagtgtagaatcatgtcgctataatcgaaacctaagtaaatgtgatccatttttttttaaaatgacagttccaaggaaagaagaatttctttctgtgaacaaaaaagaaatgcaagtgcttcttagttaagaatcagaacattttacttcgaagcattgtaatttgtttcctccattcttcctaggaatctttattaaaagaaaatatgcaaaaggacctgggaaaaattaagcttgaaggtgttgcagaagaaacggacaacctgcaaaagaaggtaaattctttccataaccaaccaaccttcctcctggtccctcccatcagccctcctgagcagttgccttggggctgtctggaaggttctgattagatcatgccagcctcttcctcccacgagctgtgctccaggtacttaatcatcaaattggttttgaccctgccagtttctgtggtttagtgggaaaaggctcccgacttaatgtctgttgtcatctctgctgaggacagagttgggcagtctcttggctctgactttcattttctcctctgaaacaaaggtggggcggggatgaaaagattgctgaggtttcttccttctcctaaattcattcagtaacgaagtacacggtgagcccaaaagcacggactgaacatcagtaatgctctctgcagcttgctgggtggagcagggagggcacagacctcatgatgaggcatctgtgcaaacttcaggcttcaggctggggtggttctgattttagggccctgaatggcaagtgagcttgtttttctgtcatcagggaattatttattctgtttagcctgtgccagaggaatggcatttagtgacctaaaaaagaatctccccttctgcagatggtgaggaaggattattgtcaaatttactgttttttcatttatgaattttgtatgtgtgtgtgtgtgtgtgtgtgtgtgtctgtactgtgatggtgtatctatacatatggatgtctaatctccatcaacacatgcacacatacacaaacatcaccctaggaagtatagtttggctcctgttaatttagaattaacgatgttttggaaagagttgaagggtttaagtttgggtttaagtacctcatcaagcaaacatttggttggaaataggctgattaaaataaattctctgtatccgttattctctttggtcttgactagaaaacaccaaactcagactgggttactctacattcttggaaattacaaacaacctttcctttaacaaagagtaaaaatcccagtagaaataacagctgaggacagctaagtgtcagcctctgggctgctgacttcctggctctcgtcttgtgtagttctcgtagcagccctgggaggtaagcgttgctgtttcccaagtgttacagacaatgcttggagatgtctgggcctgtccacagcctggagaatcaggtctaaaatcagcttgcctgactccgtgttcttaactcctagagactaacatctcataggccatacaaatcagtaaggtttactttctatattctgtatatttgggttttaaagtgaatcgagggccctcacagtatagccactaggagaatctgtagtttaatacacaattagcctgcttttaaaaacatacccatcttttcttatgctgagtgagttgtaaattatttcattaactacttagtccatttctaaccccaaaatattaagctcggcttgcatgataatgctcatctttactctatattctggaatatatgttgttgcttataagcggcaacagtggaatattacaacttgcgtattatttaaagtcaaactaattacttaaagtcaaactaacctgagactttatttttccaccagctcactaggatgttagcgagtacccaaaaggtgaatagggcaactgagagaatcttcaaggagagtcaagacctggccatagccattgagaggctgcagatgagcatcacaggtagtgtgggcagtgtctagtttgaagtatctgtgcttatctagtaagaagtcaccattgctttattaaacatatgaatagatgtatatctcttgcatcgggtttccggaaccagaggggctggaatagtttggggatcctgagatgtgcaaactttagtctttgactgagagttttagctttaaaaaaatgcatatttctttttttattttctgcattatgcctaaaacttagatcctaattctcaagccctgttatggtaaagttagtatggtagctctccatccatttgcccagaataggagctgacaggatttgggacttcagttaggtaccaagtatatccatcacattagaataatttaatcacttctcagttgggtgtgctgtggcttttagcatactattttcagttttctggctaccagaaacatatgatcgctcttctttttatattatagtgtaagggcttaaaaagtacagaatccaataaaaatcagactttatagggcaaaaggtaaggaaattattagaacaaagtatacttaataaaaaaagtaggatcaagcattggtggtttatttatgcagtaaatatttattgagaacatttatttttcatgtgcagatgtctctgccaggtacaaggaaatgctgaggttgacaccatgtccttgcctttagggagtttattggtgcatgagaagactttgaaatagaccagtaatcccaagttcatgaatgtttagttaggggatgtgcagagtacactgggatatgccaggtggcctggcctgacatggaggtccaactcagcttaggtaaacagagcagtcctcagcagagaagtttctaagttcttcacttggtactagccacttttgagaggcttattaaataattgatgaattttctccatagaaattatggaaaagacaactttaaatcagactttggatgaagatttcctactacccaattctactcttcagaacatgcaacagaatggtacatctttgctagaaatcatgcagataagagacttcacacagttgcaccaaaatgccacccttgaactcaagtaagtttctaattactgtgtgcaatgcaaccaagtagagagagaaacttgcacgctatctccaaaggagaaggaggcatcgtggaagaaaagtgctcactggaaatgaaatatcctaagagaggagaaggggccctgtggtcaagtaaatgaagagatgggtactgacccctccaaatatagaaaggtgtaatctgtgcagtcagtgtaatctatctttgtgctatcatgcggtagcttctgtccttttctgtgattccgggatgtttccacttagcacaaacagcatagcctcatggtactgtagatcaaggataaggcagtaaactctcatagaaaaaaatcgttggtggccacccataccatgaactctaagacaggtcaatgttatgccagaataattgagcttagttatataaaaaagtatagttacattgaaacccacgatgtgaagtgacacagagatcacaaagcattcttacatacagtcacaaggagtttggagtttcctttccagcttttatcttagcatttccacacaggtattacttgatatactagcacaggctgtctctctgcaggttgtaatgaatgtctgaagtgctgttataaatagttacatgatactttattaaaactctactctggacgttactatctaaactataatctaatgaaatgatatagtcatgtgagatatttaaactttaatattttgctattttaaattatgttgtgagggacttcttattcaaatgttttatatctttttctatattgaaatatcaaatatttatttatactgtatatatctcttctttttctgtatttcagattattttcagggtagatattaagaagtagaattattggctgggcgtggtggctcacgcatgtaatcccagcactttgggaggctgaggcgggcagatcatctgggatcaggagttcaaaaccagcctggccaacaaggcaaaacccgtctctactaaaaatacaaaaattagctgggcatggtggtagatgcctgtaatctcagctactcgggaggctgaggcaggagaattgcttgaacctgggtagcggaggttgcagtgaactgagatcatgccactgcactccagcctgggcgacagagcaagactccgtctcaaaaaaaaaaaaaaaaaaagaagaagaagtggaattatttagtcaaagaatttgtgttttgaggattcctaacatgcacttccaaataattttttttttatattttttaaaaacaatgttcactgccaccagcaacacactagagggttgggtatgtgtcttttttcatcatagagcataatttttgacgttgttgatttgttaggtgaaaaacaaaaggaggtgcttacagttggatggagtttggagagaggactagtaatctaattactagaataatagggcctggaaagggctctgagagaactaggatctaaaggccttgcgcagggggaatgagaggaggacgtggtcctgggagatgggcgtgagcagctgtctgtggagcccctcctctgtgccaggagagtgctggcttctcttctcacattgtgttctgtgatcatctcagtctttccaagtaggggagaacccagttgaggaaactgaggcccagggaatataagtaacttgccctatgttaagcccccgggacaatatgaaacctgaccacaaacctgaatctgtttgagtctaaaccctattattttcccacccagaacaaaaggaagtaccatttgagacccattccataaaagatgggcaggtggaatttggacagtcggagacatcgagggcctttcaggggcggggaaacgagatctaagtctagcataggtggagagccattgaacaagggaacactggagccaaagaagctcagctgaagtttgcatcgaatttgagaggcaatgggtagtggtgacagaagccaaggtgcgaacgttagtcctgcagccccgactgcacactgaggcttcagctgtgctcttctcgggcagctccaaccagggcttcccaggacctgcccaccctggaggcgatgcccctgggtggggctctgctccctaaccttcctcagccccccacacatctgagttggtggggagcatgtgaaggatggagattcccaggcccaccctgcagatcctagagaatcattttgtggggctctcccctcccaccgttacccttctgaggtcagttcattcattcattcattcagcaaagtgacctgaaccctggttacaagcattgtgccaggagttgggaacatacaggggaacaatagagccttttgcccactaggagctcctggtcaatttagggaaagtttattttctgaatatgcactttaaatacaataagaaagtttaaaatagaggtcaaattttcatctataggatgatgttagtatctaaaccacaatcacatgaaatgatatagtccttaatgacttgaacatgattaaccaccaaaaacaaaacaaaacaaaaaacccagcactcttcattagcttcttctagcaaaattgacagaggaaactggtgtttctcaagctatgtgcctctataacactagtgtcccatgaactcctgggcagattccttgaacaaatattaaccttcctaggatctgcaaggcaggcctgggactctccatccttaacaagctccccagcaactcagatgtgtggggggctgaggaaggttagggagtggagcccagccctggggcactgcctccagagtgcgtggttcctgggaagacctggttggagagacctgaaaggaggtgggtaggcagggccagcccccacccccacctgttcccctcagtgcctcctgaccctcccctattggcgagggcctctaggatccctttaatttgtaagttaaaatactactaaagagaccttttattttaaaaatcaagagtttaaaatgtattctctggcctccactttctgattttccatagataatccctatatatatgccatttcaaaatacatggattattttaggaattatctgctttttaattataattcttaaaacattggtggttcatgctgaagcatggcaattgtatagatgagaagtttagcacacagactgattacttttcatgctgggtcgggggtctccagaactaacaccacattcagagtttcaccaggacccccaggattcagcatataactgtacttacagctaagatttattaaggaagtccagccagatggaacaaaaggacacagcagagtctggagaaatccctgaagtcctctccccatgtgggatcccagagagcactcctcccccagcaagaaaaatgcagcaacatgtgtgtgatgtttctgcccagggaagcctgtcagagatgcagtatccagggattttgttggagctgtactggtaggcaccctctgcctagcacatagcaaaagtcgactcccagaaggaaagcaggtgttcagcataaaccatgttgcttgcacaaacagcccaggtagtgagctactcttagcagttagggatcagtgggaacgcagcccacctcgccagcaggcctttcagaggagagcagactccatccagcccgccacgttgactctttactgtacacttcggattattgtttgtagctgtttttcaaatgatttccatgctggtatctcagacctattaaaagattttttttttttttttttttttattgagacggagtctcctctgtctcccaggttggggttcagtggtgcgatcttagctcactgcagcttccgcctcccgggttcaagcgattctccctcctcagcctcctgagtagctgggattacgggcacctaccatcatgcccggctaatttttgtaattttgtatttttgtagagacagggtttcaccatgttggccaggctggtcttggactcctgacctcaggtgatctgcccgccttggcctcccaaagtgcggggattacaggcatgagccactgcgcccgaccaaagatatgtcattaaagaagcacattccaagacacagtgtctactaaggagagccaagttctgtactgcaggtcttctcaaagcttttagtacgctgacgcacatcagcagccccgtggaggatccggctcacttctttcaccctggaatatttgttcaaggaatctgcctggcagttcatgggacattggtgttgtagaggaacatagtttgagaaacaccagtttcctctgttaattttgctagaagaagctaatgaagtgctgagtggggtttttttgttgattaatcttgttcaagtcattgaggactatgtcatttcacctgattgtagtttagatagaagagtcatcttgtagatgaaaatttggcctctgttttgagctttcttttttctctttttgagacacggtctcactctgtcacccaggctggagtgcagtggcgcaatctcagctcactgcaacctccacctcccaggctcaagcgattttcccacctcagcctcctgggtagctgggactacaggcacgcaccaccatgcctggctaatttattttaaattttcttagagagatatcttatttaataataaggaataatagattcatgatcacacattagaaatatattgggtttatttgtgttttcttacgtatgtgttttagttcttgttgcctgctcataatgcaacgtctttattatcgttaaaaattatatcattaaaaattataagtgccgatgttattctaataatgtcagagttcaaatttataaccttgaaaaatgtttttggtcgtgtcttaacccagtgacctgacacctgtgaaagctgagggtgttttacagggcattttccatagaatttttcaaaattgtcctgacaaattaaaatgaagagttaataggatatactccaccactgcaaggatttgtagcatgaaattttattattctatgcagctataaattcaaaattgatttaaatcagcaatttgatggcatatttataaagacataggaaaaaaatcttttggtattctaaagcttgcatttatccatggtacaaatcatatctttttgtcaatttgaatttgaaagcttttatgaaatctgtttcttcttaactagctgcagaaaatccttttatcgtatatataaattggtaaattcttaacaaatcactgaatagctttctttcaatttcttgctgtattatatataatgaaagattgcagttcccatcaacacagaatgttgtcccaatttcctgaatccagattcatggagatgatcttttttaattccattactaaaatgtattagaaagtttaagtgttcggattcccacaaagcccactggacccaagtttaccaggaaatttggggaggtgggatttaatgagcttcatcatttataaaatcatcagagctgctgataaaagaagtaaagctttgggccgggcgcagtggcttacgcctgtaatcccagcactttgagaggccgaggtgggcaagtcacctgaggtcaggagtttgagactagcctggccaacaggtgaaacccaaaccccgtctctactaaaaaaaattagctgggcgtgatggcaggcaccttaatcccagctacttgggaggcagaggcaggagaatcgtttgaacatgggaggtggaggttgcagtgagctgagatcaagccattgcactcaaacctaggggacaagagcaagtcttctctcaaaaaataagaagtaaagctttgaaagcttcaagacttgtgcctgcttgtggtcatcctaaccggcttaacttgaaatacacatgagatgaaagatcaccgtgcctgtaaatttcagcaaactatatgggaacatggaacatcactgtgcacttatataagtaccatttacttcctgtcatgaataaatgtatctgtgagatgcaccactaaaaaaaaaaaaagacaatttgttaaggataaaatataaacctgccatacctgtagctatcttagaaaaattgtttccattcttaagaagttatgatgtatcacttacaatttcaaaaagagactaggcataaatacgtaaaaattttttccactattatttcagagataggagctttgttgttcatttacttactatgtgaaccattcatatttatcagggctgctgaagatttattgtcacaaattcaggaaaattaccagaagccgctggaagaattggaggtattgaaagaagcagcaagccacgtcctttcaaagcacaacaatgaactaaaggcggctgaggcgctcgtgagggaagctgaggcaaagatgcaggaaagcaaccacctgctgctcatggtcaatgctaatctgagagaattcagtgtgagtctcacttgctctctccttctcaattagaacaggtaacaaaatactccaacgtaagcaattaaaagtgagccctggcctggctgggtggctcacgcttgtaatcccagcactttgggaggccgaggcaggcagatcatgaggtcaagagatcgagaccatcctggccaacatggtgaaaccccggtctctactaaaaatacaaaaattagctgggcgtggtggcatgcgcctgtagtcccagctactcgggaggctgaggcagcagaatcgcttgaacttgggagatggaggttgtagtgagccgagatcatgccaccgcactccagcctggcaacagaatgagactccatctcaaaaaatgaaaataactttaaaataaaataaaagtgagtcccatgcactaacttctgcacgtagcattaggcaccaaaggtcagaagcagggttgcttttatgaagcacccttaaaatgccgtttctgctgcaggataaaaagctgcatgttcaagaagaacaaaatctgacctcagagctcattgtccaaggaagaggattgatagatgctgctgctgcacaaacagatgctgtacaagatgctctagaggtaaattacatctcagcacagccacagtacagtttttaaagaatcttcacacatcttttctatatgcacacatatctgttattaagtagatgtgcatatatttacaatattaatttctccatgtagcacttagaggatcaccaggataagctacttttatggtctgccaaaatcaggcaccacatagatgacctggtcatgcacatgtcccaaaggaacgcagtcgacctggtctacagagctgaggaccatgccgctgagttccagagactagcagatgttctgtacaggtaggaacacgcctttgtgggaactcaagagcttgcagtctattgatcggagaaatagatggatgtttctattcacagtgatgggtcactcttcctttgtgtaaaaatgagcactcctgttttatttacctggcaagttggatttccttgtgtctgctaacatagtttaccattggcctacatatatggtggaaaaatgcaaataacaggagaagacttaaaacacataatatgctacagtataatattaatataataaaacacatattatgctacagtatcaagccatcaaggctttattaagcacctactgaatgctcagggctttgttaggttgcaggtggaacagaatgaggttattaatttctttacagatcttgcctctttggagtttattatttggttggaggatgtggctgcccactctctacctatagaagtgttgggagtctcttttccaatccctgagagataccacctccaattattttctactgcctgaaagtctgccattgtaatacaattactttaacttatattttttggatatttaaaaaatatgtactcaacttgctaaaaattcctttaaacgagaagcacaattttagccatccgtttcaaacttgtctgcacattggaatcacctggggagcttcttaagccaccgatgcctttgtcctttagctgccttccccccaaagattgtgacttaatgggtctggggtgtaggattttgtgattttttaaaaaccctcaggtgattctaatgtgctgcaaatgtgggaaccaaagttttaggtgttatcagtgatttacataatactgtgagttaattggtaaatttctttctttaaaatttgctatgcgttatgggtgacaagtctgaccacactgggaaaatgtatgttcttgtgcatgttctgtggaaggggaaagatgcgtgtctccttattggaaaaatgctgacataaaagattagttcacacaacaaaagcaattaaaaatcgtataagatagaatattgcataaattatgcgctaaattgagtactgcttcctaatatgtcttagggatcagtagtggaaaatggcattagataccagctcctctcttctcatcagttttcatcatttcccccaaagagaaaaaaatattctgactccatacctagctaaaacaaaatctttattacttcgtatgagtaatagaaacaatttgttgtgatttaacacaaagttaaataattatcttttatttataaatcacagaattttgccagtccaatagtaacaaacaatagctgctaatattcggtctgggaattgcccgactcaataaccttggaaagaaaatgaagtgagttactcagcaggcaaagatgtgcccattgccagactttattttcaagacagagagcactggatgacattgtgccattaccagttaccaagttcctaagcaatgtgcccacttgttagaatgatgttaagctgattgaaatattagctgatcttcctccaaaatctctagtgaattttgtaaaattgtcgtatgccattagagggataagattcagcggcctcaggtatgcttagaaacacttcttggaggttaccaagtatgttgcaggaagtttataaccaatgcaagcatgcagtggcgccctagacacgcgcaggggattggaacagagattgaggaatgctgagggcagctggtggaaagtgatgaatggtcgtctaagggaaacagcaatagtctcttcttgggtattgattgaatagcagttctgagtgttatgacaaagtggctacggcttctcaaagattacttttgaagttacatgggaacccataggttgttattttttatggatgatactcttctaaggggaaagaagataggaggctttcaaaactggtaggcatttatgatttttgtgagtgaattggcaagtttgatttagtttatcataacgtatctaaatatgctgctttgatagtggccttgaaaacatcagaaatgtgtccctgaatgccaccagtgcagcctatgtccattacaacatccagagcctgattgaagaatcggaggaactggccagagatgctcacaggactgtgactgagacgagcctggtaggaaacgacgtggcttctttttctgggctctgtgggagatttttctgtaccgggtttgagcagagattcagtggccccaatttctgcctattaacattcttttctggtggaatctgtttctggcttctgtcatcatatgatctgtgttttaattttttaaggtcataaatacttctttatacagactagaaaccagtgtggagatgagaacaatctcacatttccttgcgctaaaaatgatgatgctacttgatacctactggagacatttttctataaccatggtgaaaatctttattgaatggctggtttccttccttatctacttaaaaatgtctttgttttctcttgcctcagccattttaaattgtccctacctggtacctggctgactttcttgctgggaatgtgtctgggggctactctgatggagtcacttcctctgtccccagcaggactccaccctgccctgctctcaccacgcttaagtggttctgttttccagctctcagaatcccttgtttctaacgggaaagcggccgtgcagcgcagctccagatttctaaaagaaggcaacaacctcagcaggaagcttccaggtcagtatgtggctcggacggtgtagacaggcagagtgagcgtgagcgtctcgctgagcagcctctaagaatgttctccttgcatgcagcaacttgaagcttagcatttctgtgtcccatttatattccaatttcctatcatataaattttcctatcgtataaacttcctatcatataaacttcatataatttggcatttttattctagtgatatctgttcctttattgtgcagtcatctctatctttaacctgtccataatcctccactcattgccttagcttggagccttcactgttcttcctagtgtctgttgggttatctttgattgcgtgtgctcctctagtttttccttgaggagatgtattatgcttgatatttcttttacctttctcatggaactaatatcatattagactcatggtaggttctcatttaataatcattaaattaaatcctaattgatttagccatttttcaaaaaatacctatgcagtttagtttgtcctaaagtttcaagaaagaatgacttggcatatgtaagagcaatccatccaataaacatgaaccaaagtggcagcaggaatctgttatgtaagagaaactacgtaggcctacaattttttataacaaataatgtgctttccaccttaatatattctaatagatcaaaaataccaagatttctggaggagtaaatagtgggccaggcacacagctcataccctttacaggtgacttacttccgagtctaacactggatccttccacagctgtctgaactaaaggcttggatatgtacataatttttttttctcattgagtgacacagtttaaaatttatgttgtcatctcacagtatcgaaaatgtataatgtgttgatgggctgtaatttcagtctgtacaactagaggtacttcataggtagtgaaattgggagcttgctggcaattaaaatttcacgttttaaccatgtgctcaaaatccaaatgtgattgtatgttatgaacagaaattttaaaagtaaaagctgtgatcaaacttgagaaggaggttgagttgagttccagttgggtggccagaagggaatagtaggggatggaggattggccagagatgcaggtgggagactgtgaggaagactcccaggtaggagcccaccctaggggttttacaacccagaggagaaaggtggccaggattcagatgggaatagaaagttagtgtgtctgattaagactgagtgacttaaacacagctcttcatccttgagctctagtaaaattggacatgaaatttaagtagaaatattagtgaaaaagtcaacaagcaaagtagagaaaatgatcgagcaagctagaaacacattcttaatttctttttttttttttttgagacggagtctcgctccgtcgcccaggctggagtgcagtggcacgatctcagctcactgcaagttccacctcccgggttcacgccattctcctgcctcagcctcccaagtagctgggactacaggcgcccaccaccacgtctggctaatgtttatttttatttttatttttagtagagacggggtttcactgtgttagccaggctggtctcaatctcctgaccttgtgatctgcctgcctcggcctcccaaagtgctgggattacaggcgtgagccatcgcgcctggcccatactcttaatttctataatgagtggtgctcagtcttgctggaaaaactgtcaatattgggaatctctttagaaagctatgaattctgtcgatggtcaagaatgataaagctgttgcctaggcaacttttttgtaggctaacctgaaaggaaacatttttctccctttaaataggtattgcattggaactgagtgaattgagaaataagacaaacagatttcaagagaatgctgttgaaattaccaggcaaaccaatgaatcactcttgatacttagagcaattcctaaaggtaagtggaaaggactttcttctgtaaataacgtcttctcattgtaaaagcatcactcaggaacataaggaagtcctgcctcaagactgataaaggctttagctcaaaaatgagactaagattggcaaaatttttacttgcaaaggaatatgatttagaaatgaaaatcattggtttttaaaataacatcacaatacttgcatcaagctactagaattatagtcttaaaaacagagactgcatagtatctgaattgcttacttttgaaatgggattgacacattgcttagaggaagaaggaccattgaaagaagtcagcaagtaaagaagctggaatgtgctttacctgcctaaggggaaaatgccagattcattatcagtgtggcgaactgaagactgctcgcttggccatcttcctcagtgaggcagtaaaacattaggctcactgatcactttaatactgatggtttagaaatgtggtattcatgaaattttttgggggggtctacagtaattttattgtaacagagaagccaggccgcaataagtctacatgattagagcagatggtggttctttccagtgggtgaagcctgaacccggctagcagcacacattttttgagacagagtctcgctctgtcgcccaggctggagtgcagtggcgcgatcttggctcactgcaagctccgccccccgggttcacaccattctcctgcctcagcctcccgagtagctgggactacaggcgcccgccaccgtccccggctaattttttgtatttttagtagagatggggtttcaccgtgttagccaggatggtctcgatctcctgacctcgtgatccgcccgccttggcctcccaaagtgttgggattacaggcgtgagccaccgcgcctggcctaaagttttaaataggataatttttttatgtgtaatacaaatgaatcgtgctgcacctcaaacttctcttttgttcttttgttgttttttactttgaaaatttcaattgttttatagagaccgtgtcttgctatgttgcccagattggccttgaactcttggcctcaagcgaccctcttgccttggtctcccaaagttctgggattacaagtgtgagccactgtgcctgtcctcctttttttcttaataagcatcttttgaaaaagtcttataaagtgctttaaagccattaaaaacaggaagccccaaagtcctgtttgtaagcatggaagttacctggggaaactgggcatgctgcattgggcttacttcttactttgaaacaatggagcattttctgatccggaagattttttttttccttttctttttttataaggatgccatggtatattttgactaaatgcttaataacgtttttatttgaaaataatttcgagcctacagaaaagtttcaggaaaagtaaaaaggccacctgtataccctttttccagctttttctgctgtaaatgttttgccccacttgtgattaaatgcttcgaaaatgaatgatagtgtcttttaaaaatcctcacccagattttctagaataactgaattccaatttaccttgagtggctgtttgggctttattctgctgttacttctagcagccagttgatgctatgggcaaatacctcttcctttaacttaagacattcccaccttagctgcagacctaggatccaaatccttattatccagacatgaaaggaggtggaggacatgtttcatgaagctgagaaaggagtgatggaaaaggacccaaataaagaagttcagcttattaagatgtaagacacagctcacacagcgattggccattacttttgtgatctcattgtttattgaaatcatattccagagaagtattaacaaaaattatttcatttgtccctaaaaggggatagtagagcatatgatatgcagctttaatattgccattagaaacaagaagctcttagttcattgaccactgcccaaaagaaaaaaaagcaaacagacaagcctcagtttgtgttcagcatcagtaatatgacaataatatatttctgtgcgaaattacatttgttgtcgttttattcttttctctgtgtgtaagcaccagaagtgcatgcttttatatacatttattttaggtataagagacaagggagccaaaaccaaagagctggccacgtctgcaagccagagcgcggtgagcacgctgagggacgtggcggggctgagccaggagctgctgaacacatctgccagcctgtccagggtcaacaccacattacgagagacacaccagcttctgcaggactccaccatggccagtatgtcagcgcccttccttccagtcatgatcgtctgcgtcatgcagacgtggagctagctaagcacacagtggtgcgtttttcacaacattcctgaaaagtagaagtatgctaacatctggattagcctttattaagagaaggaccttgggaaatgcatgctacttgtgcagttttcatctttgtaccacaatgtcatggctttgattgttagggtgttgttttaccaagtgcattgttaatggacaattaattatcttgtttttccctctccccaactttcttgccaccccttgccttcttgtatttgttagctctgttggctggaagaaaagtcaaagacgtggaaattcaagccaaccttttgtttgatcggttgaagcctttgaagatgttagaggagaatctgagcagaaacctatcagaaattaaactgttgatcagccaggcccgcaaacaagcagcttctgtgagtttggggccccgtggctttcgtaactgggctctcagtcatgtggggtcccagggaattcatgcagacatggccctcagtcacactgcgccccttagggcttccaaagacccagatcccaataatctgggcttcctcatagccctgtcttggtatatttaaagccaataactagcttcattttctttgagttctgcttttgttcaacatgcttcaaaatgttgttagcaaagagatttccatgtctttatggagatttatcattatagactaaatttaaaactattagcctggacagtgcggaacatgtcaaatctacgtgttaacatcactcttaagtttatgggttgcatgtggtgttagttcttcgttttaccaacttagttttaataatccaagtattccttaaaatgtttgtgtagtatgggcctcatccttgaggtgtctgagaaaacagtttgtatgcaacgaaggctgcacaaatccaggtcactaaatgcctgaggcactggacacctggagcagttcacacatgagaagatgttttacccatggcacatggcactggctgtgccctaagggaaaaagtttccttttgagagaatgtgcagtcgtcatgtgattggggacttcgagaggatgaatgcagcctctgggcttgcatttgtccacctgaggctttctagggaagagaaaggagcacagggctctgtcttttccaaaacctcaagtgtccttgctattggaaaaggaatgttggtttccatgagctctggcttgcatctgtttcagttacaattgctaaataaatacaggctgggcctggtagctcacacccgtaactcccacaatttgggaggttgaggtgggaggattgcttgaggccgggagtttgagatgagcttaggaaacataataagatcctgtctctactaaaaaaaataataataataaccaggcttggtggtgtgaacctgtagtcccagctactcaggaggctgaggcaggaggattgctcaagcctaggagttcaaggctgcagtgagctatgatcacgccactgcactccagcctgggcaacagagcaagaccctaaataaataaataaataaataaataaataaataaataaatataagcccaaggaatgcttcttgatgctaggttaataccaaacttagactctttaatgtaagatacatatgcaacgaattactagtcaaagaaatatgtagtaagtgcaataattgctctataaatatctgctgagtgaataaatatattacctctccatttattcaacagatgattatcaaataccctctttctttgtgtcaggcggaaagattccaaggtgataagatccttgtctttaaggaattaaatcttatatgagcaagacagtttcctatataaaataacttattaaaaactaacactgattttctcatatttaaacacttaatgaaatcatttttgttaccatctgatatgtcacttcatgaaacatgaaccattgtatgttatcaagagaggaaacctgcctcagtgaaaattcattacagaatagcattgttgagctgctggtgagctgccggtgtgtgtcactaaatgatggggacactttcattttccttctacagattaaagtcgccgtgtctgcagacagagattgcatccgggcctaccagcctcagatttcctctaccaactacaataccttaacactaaatgttaagacacaggaacccgataatcttctcttctacctcggtagcagcaccgctgtaagttatggacctttggaaagcgacactgaatcttttatgcacttctagatttttctgaattttcacttatttgacgaaaaaaaaataggccttagtgaaatctctaaatctcccatagggactaacctttgttaaaatggtagcattagatgaaaaatgaacaaactaccaaatggaatgcctgtgagaaggaaagtggcgtttctgaaggatgccatcttaattgtaagccttggggatggaacttttttgtgattcccccgttgacccctggagtgactgagtagcagaattgtcaagcttctgtcaggtttttcttgccaaggattccagtggtctccagatggcaagtgcctatgaaaggtcttcgataccttggctgtgccagtgagaacaggtcagaagcctggggtgtgtagggcagaaaatgttaacgggcacatatagtatctgaaatgtcttcaggagatgagatgcaaagtgcatgcaagtctgtgacaggggtgggacctcatggctcctgtcttactgcatatttcacatccatttcttacctcggagactgggcaaaggagcaagctcagtgccttccctggtgctccctgtggactgcctgtgacctgcagcgaattttcctggggactctgtgggagacattgaggagggccatgccaggcacgcagggaggcgctaatgtccccggggctgtgagtcatgccccagctccagggaagggaccatttcaaacaaaagaaaatagatttggggggtttgctttttatgtatttatttttaagaaaagagaaaaccccgtaagaattgactctgtaaagtgttgtggtggtcagcaaacagtccagtgtgtaaactgatccccgttcattcctcgccccccagtctgatttccttgcagtggagatgcggcgagggagagtggccttcctgtgggacctgggctccgggtccacacgcttggagtttccagactttcccattgatgacaacagatggcacagtatccatgtagccaggtagaagagaatgttctctcaaagcagctctcttttttaaagtgtgtctcataagtaattacatgcttgtaacatcatataataggctttgaaacttctggaaagtcagattataaccaaacaatacttggtttaggttagctgtagaaataagcatttgtggccagtggctcacacctgtaatcccagcactttcggaggccaaggcaggcggatcacctgaggtcaggagttcgagaccagcctggtgaaaccccatctctactaaaaatacaaaaattagctgggcgtggtggtgggtgcctgtaatcccagctactcaagagactgaggcaggagaattgcttgaacccaggaggtggaggttgcagtgagtggaggtcgtaccactgcactccagcctgggcaacagagcgagactcccatctcaaaaaaaaaaaaaaaaaagaaaagaaataagcatttgttacaagtgacagaacttcttttttaaggctgaataatagtattccattgtgtatttgtgtataaaaccacattttctttatccattcacacattgatggttaatcattccacatcatatccaaaaatcataacaacattttgcacctcagaagtatatacaactataatttgacaatatataataaaaattaattcaaaaaatttttttaaaaacttaaggtttggatttttttcttactgcaggagaaacaaactttgataccaaaatcaacaatcagaagaagaaaaaactgaaaagcttaggttacctttagaatgtctaaaatgtctaaaagtttaggttacctttggagaccaggcatggtggctcactcctgtaatcccagtgctttgggaggccgaggtgggaggattgtttgagcaagaaggagtttgaggttagcctgggcaacatagtgagactctgtctctaaaaaaaagttaaaaatttatccaagcacagtggtgtgtgcctgtagtcctagccactcgggaggttcaggcagggaatcactggagcacaggaggtcaaggctgcagtgagcaatgatcacaccactgcgttccagtctgggcgacagagcaagaccctgcctctaataaagttaaaaagtaaagaatgttacttttagaaagtctacgtgtaaggcagccaacctggtaaaattcctcaggagagaggtgtaaggtgtggcatggtagacattgcatgtggctggcagcacattgcacttaagtcaaggacagaaaataaggatgcaagtggggggtgcattttcttaaaattcaggcacaaagcaaaattcttctttttaaaatccttcagaggtaatcacttttgagcagctttaagtgtatgttttcacttttctataatattatggtttgttgggatttttttaatttacaaaatgggataatatttacggagtagacatatcttcagatacagtttagctcatctcagatgttttaagcagggacacaacatgatgaaatttctgtttcggaagagacactcttgaagatttcgggcagtaggcaagactggaagccaggaggccagcaggggggtgctgttgcagggcccttggggagaagcagatggtgggtgtgaaggaaacgggattgtatgtgcgctgactggaaattctgaaaatttcttttgcaattctttgtaacccttagatttggaaacattggttcactgagtgtaaaggaaatgagctcaaatcaaaagtcaccaacaaaaacaagtaaatcccctgggacagctaatgttctggatgtaaacaattcaacactcatgtttgttggaggtcttggaggacaaatcaaggtaacattacgaaagttcttctgaacaggactgattgactgattttacctatatataaaagtcatgggccgggcgtggtggctcacgcctgtaatcccagaactttgggaggccaaggtgggcagatcacctgaggtccggagttcaagaccagcctgaccaacatggagaaactcttgtctctactaaaaatacaaaattagccgggtgtggtggcacatgcctgtaatcccagctactcagggggctgaggcaggagaatcacttgaaccctgggaggtggaggttgcagtgagctgagatcgcgccattgcactccagcctgggcaacaggagcaaaactccatctcaaaaaaataaaaaaataaaagcatatgtttagatggttgaatatatcctaagcagatgaagatgtttctgcttttgttttgctttctgacagttcctctgcagagttaggctggttttgtacagtaaagggtgatgcttcatcagtagcataaatggagaaaaagccaatggctcatcttgctgtttgggtttctttcccagtgatgaacaggaaattcagtgctccacgttaatttctgtaaagtttctttatctctagtctagctctagttagtggtcaattaatactaatcagtgtttagcaaaaaagcccaccatatttattttattatatcagttctcctctcaccaaatataattgtgttttttggatctggttcaatgctctgaagtgggagtctaggtctcaggtccagctgggccctcactaccaatcacattctctggctctctgttttctcactcgtacaacacgattctctccatcaaccctagtcactgagatgatctttaagatcctgcccagttgttactcattctaggattccacttcataactgaaaggaaatccagtgattacaaactggcttttttctaatgtggctctctcaaaatttggatctgttagattgaagctcccagagagaagttttgtgcacttggagaatgtattttgcttggtcagcttatatattggttatgtttgtttgcttgtttgcattagaaatctcctgctgtgaaggttactcattttaaaggctgcttgggggaggccttcctgaatggaaaatccataggcctatggaactatattgaaagggaaggcaagtgccgtgggtgcttcggaaggtaagatgtcgtcacggtttagcacatagtatgttattctgttaacatctgagaagtgctgaaagaatgtattaatacatgcacgtcaaggaatagagtttgtgatatcgctggtaggtgtttagctgccaattacaaagccatgctttttcatacgtttattgtcaaaaaaaaatcctgtgacattggtataatgtagattataccaatctacattatattattatattatattgtcagatgatataatgtagattagttactgagagaagcacaggtatcatttttaaccctttaaaaagaagtgctctttttcctatgtcttttatgctttgatcatggatcataaaccctaaacgtttcagacaatttctcaaacaaccttctgtctcagagagccacaaccaaatctttataaatcactgtacatttttattttgaaaatatctccaaggataagaattttttcacgtgtggtcagtttttacagctaagtactttccaattccgaaccaagttctataattccagaaataaaatgcattaggaaatagagaaaaatgagtatgtttctgcatatattgatataaaggcattcaatgacttaaccttaccaagtgcaacatcttcccccccaacccattattttataacaaaataactgcaactccttaagtatataaaacctgttttccatcactttagtaattaagacataaattgcttttttccgttagagaaatgtaacatctgatataatttctcttgtctaatgggctgctctgtccagatggatatctgcaattatccagtgacaagatcagttaaagcaactcacagcacatttagaaactcacgggtgaatttttcattttgtcattgtcaggtctgtagtttaagccttctcttttccccttccttcgcttgtttaaaaagttaggaccaggcggtcatggtggctcacgcctgtaatcccagcactttgggaggccgaggcgggcggatcacctgaggttaggagttcgataccagcctgatcaatatggtgaaactccgtctctattaaaaatacaaaaattatctgggcatggtggcacatgcatgtagtcccagctactcaggaggctgagacaggagaattgcttgaacccgggaggcagagccaagatcatgccactgcactccagcatgggtgacagagcgaaactccatctcaaaaaaaaaaaaaagttaggaccagaggtttggtgattgtagccttaagattgaaaaagaatatagggtttggagtcttgagtttctcaggcttctggcccaggtcccccaccaaaattttcttccctgactttggataataagtctcttcacctcactgaggtttggtttctttttccagaaaagaaaaatgatcatcgttcttgtcttacccacctctataaatcacagtgatgaacacacaacatgatgcgtgtgaaaatgctttataaactggaaacactttaccagtcttcaccactggtctcctacagtgatgtggctttgctttgtagataaatgtcacaggatttttttttgacaataaacgtgtgaaaaagcatggctttgtaattggcagctatgataaaaaatgctgttgcctcgtgaggtaatgacacaccctgctctggaacttcagtggaaagagcatctgaattcaggctctctgatccgccactttttccttattctgtgtttccagcaaggaactcttccagcaatttagtaattctaacatgaaaaacaccccgacccctagactctatcccctccactgaccccagatcattaacctcactgttagaaagaaaaatggttaacagaaattaaacatttctagtatgaaaaagtccccctactttacctgtgaccatatcctctattttcatcagtcatttccagaggtattttgaaatcattgacgtcaagctacagcactgaatgaattgaatgatttccggctcttctttttttgttgggatgaggaagtcagctttttaggtggtcacatgttttgttccccttgaaatacctggcctgcctccggatttccacacaccctggacctttgggtcaaagatgctgccctcctgccaactcgagactggctttttgacggagggctggccacccagctgagtagtagaaccacattgactcatcagctcaaccaaactagggtctgattaaatatgtttttctggggactgaacaaatccactgttatattggccaacatttccaaaaatacgtgtttgtaaagaatgctagtttggtgtagggtattaataggtattgtgtactgatcataaatgtttgggaaacactgagttaaaaaaataagcatgtttcttggctgcgaggccatcggagcctttaattagcattaatatgctgacatgcatggtaaccctgtcctggggagaggctagagttgcagcatttcccaaactcacttgagcttgaaccctttctgaaaaggtacctctgggtgagggtcacgcctgtaatcccagcactttgggaggccaaggcaggtggattgaaaaagattagccaggcatggtggcgtgcgcctgtagtcccagctactccggaggctgaggtaggaggagcacttgagcccctgcacttctgcctgggtgacagagtgagatcctgtctcaaaaaaaaaaaagtgcatctggagttgcatctgcctcgtaaaacatattttgtgaagtgctgatataggcacagactggcactttacgtctgtttgtaaattgattgaaccgtcttcattttaggtaacatcccccactgcaccccttctcctgttagacaagaactttagttcaaagagttaataccctaattctagtaacaatccattttagcagacttagattataattccttgtccctttctgtttgtgtataatttgccattattaaatcattagtgtagcccatcgatgtcctctaaatttttaaaaaatttttgactgtttactcttaaacgtgatttatattaccaagtaaatgaattgaaacttttttattcctccttgaatatattattacacttgtacatggggtcactctgtaattatgagcagtctgttatattctcaaaggatgctgcagaattaaccactgattctaacagtcctcatcaaaatcaatatggaaagaccctttatttaattaacaggcataatccttgtattatttacgagtggacattgtgagagagtgctggctacgtggctggcctttgacacgagtcagtcacctgcgttccgggccctctgctaggtaccggccatgtccacatacatcacacatttatgtcctcagacatctcatggcgtaggggaaaatgcctgtatagaaagcagaaaatgcatgggctgtggcaaggggccagagttggagaagcagcatcccaagcccgggccagggttatctcatgccctcgcatgacggcagcagggcatgctagtaggtcagctccggattatccacatctcatgagggagccctcggagaatcagggaggtctggtgattcttccagactcacggggctgagcgctggggagggcggacgctctcctaattccaggctcccacttgaacctgcgggtgatggtggcatttccaaggctggaacagagctgtccacaaagtgctgtgatgaaccgagctttcatttgtcctgggcccttaccaaggcagagacccacttggggaacaggcacctgggccgactgttgaggcacatgtgcctctggtcatagtctggaaactggcaggggctctgggagaagttcagggaagtgactgacatggggacaagccttcggtcatgttcagtcatcatttcatttgaggtccccctcttcgtggccacctcactccagcaggccctgtttggggagagaacccagtagcagagcccccgcgttcttgagagaggagggctcacaggctctgggaagggagaaagcccccatgtttttgggagaggagggctcacgggctctggagagggaagggccatgcactgaggaccaagacaaatttctggagttttgtttgaaacctggctttgtgatttcttggggtgtgtccttgaacaaggtactttaatctttgaggctcagcttttcataggcagaaatgaagaccggcccatcgaggacctccgaacactgcagaataatgagagaaaacatctgttgtgtgccaggcactgttctaagaactgcctggggcagccctcccagagaggttttatggttatccctgttttatagctgaaggaaagggcacacagagaggttaggtgagttttccaagttcacacagctagtatgttggggacctgggatttgaaccctagtagtctagctctagagtctctatcctccggcacatgcactgtggttggccaagaggtagaacaatggaacatatggctaggaagccacaggcttaagaattaaagaattaaaccatagttgaagaatttatctagagtgcatttcttttaagttataattcctcaaagagaccacatgatggaaatttttgaaaaagcaagagtgcaggtagttatagttatacatttgaaacctcaggtttcacaaagcactattttttgttttgttttcttttatcatccatggaaacgattttactgtttggttagactgccttgcttggaaatgtggcactgagttttgttgttacacctctaactgggaacagttcaaattcttacccaaaaactatcctcatccaagtttcactctcaagcctcatgatattccagaaaattatttttggaacataattatgatctgttccagatgaatggctttgcgattgaatagtgagtcaagtcagccttttgctctgttgggggagaagaccagaaaacacactcacctgaaaatgccctgggccgtattatatccctgtttcaacctacgtactcatctctaagtatgatatgggtctttaagctcatcctgcagatttttgaggatgtcagtgatgattgttttgtgaagtgatgcttctggtatatgggcacatacttgctttccatcataactctagtttccctaaggtattagataaaacctcatcagcaaagtgaaaatgtcaatataaaaattattctgaaggcaccagagttaagagaggacagttatattaaaggagattagaataaataaatccagttgataaactgaaatatttatagcagttatcctcctgtaaagaaatgtatttttaccacaatgaatactgcctacattaacattattttccttataaagcagctgggcatttgtcttgcatcttcacatggcaagcatatttttaaatattatcatctacacttgttatgaaagtatggaactaatagctctacagtgatctttgtgaaggagaactcagtaagtgtgttcttggttctttctaccctcctgagaatggattctatttcatctcttctgctttgcagctcccagaatgaagacccttccttccattttgacgggagtgggtactctgtcgtggagaagtcacttccggctaccgtgacccagataatcatgctttttaataccttttcacctaatggacttcttctctacctgggttcatacggcacagtaagagtgtttgtgcggccctaggccctactgtatacacacatttagattgctatgtggttgtttatgtttaatgaggatttactaattaaatatgtacatatgtataccatacaatttttatgagcatatgctagtattaatatatgtgtgtgctaaacaatttcctcattttaaattatttattatcattgtagaacctttagaaaaatatagaagaacaccaagtagaaactagccttctagtctttatagatatcaattcaacatttgttattaaatttcgagctcaaataatatgtcttgttctgggttcactgtgaccaccgtgacattgtttgaattccatccatgggaatttcatgttcttgtttgcatctcatgggctggtgatttctgtctttcagtcttttggttttattttttagaacgggccccttgtcagtctcaatgaaaaagatacgaggagattccacttctcttactgaattgtggattttggtaacaacagatgacatttcatttatattagtgtagtgttctagaaagccttcgtgggcatttttggtttcgtagccgatagacctctggctgtggggccagatccagttttctcagtttgactttagaaggtttcagccatccctgacttgaagggaaagggaaacctgggataaagctataacctggggaactgtgttctcttttttacagaaagactttttatccatcgagctgtttcgtggcagagtgaaggttatgactgacctgggttcaggacccattacccttttgacagacagacgttataacaatggaacctggtacaaaattgccttccagcgaaaccggaagcaaggtagggacacagatggactcaccagatgtcggtcaccctcataagaatagaaatcttttcaaaatcagcattctttttttccacagtagtttcctgggtattgaatgatagtctacttggaagccagtgttgtctttggaatactaaccaacaggattcacattttgctggaggagggttatacttgtatttgcctgtgatttccaagtgtgttatttaacagtaaatgctggattggaatcaagaatcaaatccattctgttttcttccacatgcatactgctcttatttagcaatgtgtattgactttgatagagaggattttcacttgtccttcaatagccaagaacattagctgatcaaattcgcagaatctaaaagaatatgcatttgtaaatgagctttgttgccagaagtttgcattttaccttaacatggaaagggattttccttttcttatctcttgcctgtgctctccttttaggagtgctagcagttatcgatgcctataacaccagtaataaagaaaccaagcagggcgagactccgggagcatcttctgacctcaaccgcctagacaaggacccgatttatgtgggtggattaccaaggtcaagagttgtaaggtatattaaactgcagaattttcatgtcgctgatttccaactttattagcttgctagggctgagaatggactgtatcacaaaccaggtggcttaaacaacactaatttattctttcccagttctagaggctgcaagtccaaaagcaaggtgttggcagggcttgcttccttttgagggctgtgagagagaatctgttccatgctcctagcttctggtcgcctcagggattccttggcctgggtcctgtgtccacatttcccctttttataaggacaactgtcatgttgcataaggacttcccctaatgacctcatcctaacttgattacctctgcaaagaccttttccaaatgaaggccacattcacacataaggaggatcaagactaccacatcttttgggaggacacggttcaacctgtaacatctgcttctatttattcagagtactctatgccatgtgatttgagaagtaaagcaggccttctgcagaaaaattagtgattttatatgtattgcctttagaacgtctaaatcctgttaccgtgcaatatttggagaccctacttgctgtcatacttcatctccctctctctagacattttagagaagtagatctcttttaaggcaaaaggaaaaaaaaaaaaagaaatcatgctttctgcagacttttctggattctcctttgtgtggttagactgaataatgtatgtgcaagttgaaagaccagcatcaagaagtggaatgaaatggcacaggacacacaatggaatccttgtgtaagactgattcatgttgagctttgtgattttaatgatttacagaaactttgtgtggctggttcattgtcctcagttttgtaattttggttgtaattaaactctaaggttctttcacaccattcaaaaaagacatttgtgaaagtccaatagtcaaggtaagacagcttgcagggagtggggtcattagatgtccaaactgggccattcagcgtagtggttagcaaatgtccatttgtagcagtgctctatctttaggtcaagttctttcatagactcctcttatgtggcacagagctgcagccattcagttgctatgatgagcagccttttgtagagagagccacttctccactgtgccccttctctttgccaggtatcttagaaagtcccagggaacacagtttgcaaccacagccgcctcctgatcttagaattgaatccatttaaacctcagcggagttggtcacttgcgaagtcttaccttcctgccaagacggagccaggactggaagctgtctccagatcccatcccagattcatgccctgtcatgctgggaccaggactggggtgttcctgtagcctcggctatgtcctagtacatctggactttgcccagacggcccagtgtagacaacgcaggaaaggacagaagcccatatcacagatgttctcagtagaagggacttaggtgtcatcaaagccagcctcctcgtttacatggaaagaaattgagatctagaaaggctgaaatttgtccaaaatcatatagttgcttaatggtccatagctcattgttcaacatgagaaaaaaaaaaaatgaggtgtggctgtaacaggaaaccatgttattgcaaagctctcctgtgaagagctggtacagaagagtgcagctgggagatgttcagtggtctccatattttggaaattagagctggactacattatagcctgacctcagccaggagtgtggagacttctggtaagaaaaatatgatattgacttgaacattgagaagtagagtttcggataatcccagacttcaccaaatacagttacttcctttaggacaaagttcatggatatgcaacgtaaacaacagccaatgacttcctttgttagcagtcagatcctggcaaatagcattacctgcacttgtccccatgggaagcaaacattctactctacatggagactggattataatctatgtgctgcaatgcactgtgcactgtctttcttataattggcctgtgttttctgtaggtagccatccaagtagccaaactcactaagtttgatccctttctctagtcctaaggagagtaagagagtatttgtttgacctgaagttctcactatcaatattgctcttagagggaggccaagacatttctgcagagtaacacatggaaacaggtattccagaagtatagggttccccccaccccccgccctttcttgttttggggggcaggatcttgctctgtcacccaggctggagtgcagtggaacaatcatggctcaatgcagcctcaaactcctgggctcaagcaatcctcctgcctcagtctctgggactacaagtgcatgctaccatgcctggctaattttttattttttgtagagacagggtctcactatgttgccctggcttgtctcaaactcgtgggcttaggtaatccttctacctcagccttccaaagtgctgggattacaggcataagccactgtgccttgcccagtggctttgtattccttctttcaaaaatggaatttaaaaacccaaattttgtgattgttctcatgcccttccctacaggagaggtgtcaccaccaaaagctttgtgggctgcatcaagaacctggaaatatccagatcaacctttgacttactcagaaattcctatggagtgagaaaaggctgtttactggaggtaggaaacattgttattaatgttcaaatgagtttccataagtgtccattgatttatcaacatcataacacaacaaaccagtggggatagaaaagagatgatggggaaatcagcagtgtcctccccacggaaggtttggccgcagctaggaactcaccatgctgttccatctcctctgtgtccagcccatccggagtgttagcttcctgaaaggcggctacattgaattgccacccaaatctttgtcaccagaatcagaatggctggtaacatttgccaccacgaacagcagtggcatcatcctggctgccctcggcggggatgtggagaagcggggtgatcgtgaggaagcacacgtggtgagtagggccagtgctcctgagccccaagctcaggaaattacttcgggaaacaatgagtggaaaatgactgactcataaacatttattgtcaccgtgttcctggttgtttatggatgtgcattttcaataagtaaaagttattgttgctgaatgtcatcccattatgaatcaatgatttctcatattgcataatccatcttcattgtctggtgactgaggaaaaagttatttgctgtctacctctaattttttaaaaactcattcagatagcatatacggagttttcttccccatgttgtggtcatttttcttcattccaaggccaacagcagtccttaaatcctgtcgaggtcttcagtctactgctggatgaagcaagactttctttatctattataggattgaaaggagcagcaagggaaatgtgggctgtgataagcacagtaaactaacagggggaaaggagagaaatgatgaccattttccttatttatgttccttttcaagagcataggtgatatttccccatcctctgctcaaatttgtgtctatcacataatttgaagagactttacagaatgttagcacactgtcttaatcaagttgagtccatgcagctaaaatctatagaatgccaccttgtactctgcagggtactttacagacattgctgtgtaattaatcacaaccatgctgcaaggggaatgctgcttcctacattttgctgaggaagaaatgtgctgagagagcctagtaaacctgaccaaggtcacaccactggtatgagtcacagtcaggactggaacacaagtttgcagaacccaaacatgtcacgacatacttggggaagggctgacagtgactacgactggttaatgagttccactgatctttttttttttttttgtagttgagctgaaattcatataacctaaaatcgaccatttcatagtgaacaattcagcagcgtttagtgcattcacaatgttacgaggccacctttcctatctagttgcaaacattttcatcactcaaaagcctatgccattaattagtcactccccattctcctctctccccactcctggcaaccaccaatttgctttccggctgtatagatggatttactattctggatattttgtacaaatggaatcatatgatgatgtcttgcatctttcacttagcatgtctttgaagttcatccccattggagcatggatcagtacttcattcctttttatggctgagtaatattccactgtatatacataccacagtgtgttcatcagttacttcatggatgaactttggggcatttctgccttttagctattatgaataaatgctgctatgaacatatgtggataagtatttgtttgagtccctgtcttcagttcttctgggtgtatacttaggagtggaatcactggttatatgataattctatgtttaactttttgaggaactgccaaacttcttctccattagtcttagtaaggttaccttcaaatcaaagtgtgcttactaagtcagcaaaaaggaatgatattagccattgctagcaagggtattgtgagatactcacgttccaattcttctagtgtataaactacctcttttcaatgtgtcgaaaaaaaattaaaagctttaaacattttcacatccttcaaatgtttaattctacttttcataatgttggaaacaacatcacaggcaaaacaattaaacattcacatgtatggtaataaaaagttggaaaatactttaaatttcattgataaaaagacaaattacaatatatctacttattggtatctaatgtagcaataaaccataaatatgaggcaatgcagaatggaaatgtttgaaatcttcagcaataatagcataatgcagaatataaattatatgaacagagattagaaagtaacatacaaaatgtaacattgtgacagctgaagagattcttaaggaattgctctactcacttgatgttaatcttctcacgttatcttcataagatgaaagttttctaaatcatatagtaatgtgttttgtctgggaaattctctatgcaacctccccagcccttcttttccgtcatgctgatcggaggcaacattgaggtacatgtcaatcctggggatgggacaggcctgagaaaagctctcctgcacgctcccacgggtacctgcagtgatggacaagcgcattccatctccttggtcaggaatcggaggtacttgcacgcggccaggcagtgtgtaatgaaggtgtggtgagctcagagggaatgtgggaggaaccttgcggtggtgccctgggcggctagatgactggggtcatcggcatccagacgattctagaaccttgctaggattctttcctgggaaccagtttcatctgctttgtaataagatacttgtagaatttttataattaaacaactttagctctgccctttactggggcccagcataaattgtctttacattggattgattctgtggcaaatagtagtacactattagtaaatagtattatatcaatagtaaatagcattatatcaacattcctgtatatttccctccaaaatatagactgaatgctttaaaagcacactgggcattttcatcataggtaaagaggttaaaaaaaaaagaaaaagaaaatctctccaaaaagcaatctcattcaatggatatttaataacattccattcgtttctgaaaaatcttcagttgtgagttttaattttcaagattcacctttttggtcacagacagtgtcttgttaaaatgaacctttagggaacttttattattcagtgagaacttgtgggaattatggactaaaatggaattattatttcattatgtttaaagcttttcatttattttctccattggtcttttagaattatcactgtccaattggatgagaacaatcctgtggaaatgaagttgggcacattagtagaaagcaggacgataaatgtgtccaatctgtacgtcgggggaattccagagggagaggggacgtcactgctcacaatgagaagatcgttccatggctgtatcaaaaacctgatcttcaatttggagtaagtgtacctgctctctgcatgttcttgcactttctgacctttcatggtgagtgctaacactaatctgaaatctcattgtactgtttgagattgaaaactttgcaaattcccaaataatgagtgaaccccattgttctatcatgtaagtctccccagatggattttattggattagaatgttagacagatctggtcatcatactttaaaaaccatcgctgaacattagctctctgtggctgtccataaagagccgggattttaatatatttttgacatgcatttgaaggaacatagggattttgtgatgtaagtctcttgctgtcctgagagcattgctttgaaggagctgtttactatggggctactagcagcttcaggttatcaatggcttccccaaaaacaattactgtataattaagaaccagaagcctttgggggtccaaggcaggcagatcatgaggtcaggagtttgagaccagcctggccaacatagtgaaaccccgtctctactaaaaatacaaaaaattagccgggtgtggtggcaggcacctgtaatcccagctactccggaggctgaggcaggagaatcacttgaacccgggaggcggaggtgcagtgagctgagattgcaccattgctgcactccagcctgggcgacagagtgagactctgtctcagaaaaaaaaagaactggaagcctccattccctgtgtggagctcatgatgaggaaaagaactgacatgtgcccatgagcagttcattcctccttgctcaccctctgcctctggacagggtgctgatgggacacaagctgtgctctgctctgtgggaccagcatctgcccaggaacacctggaagtgccctgggcatcaggaaattgaagctccctcctggctgggtcactgacttgtctagtgaccttggacaaagacttggatctttcatggtcacagtgtccttatctgtgaaattacctcttaggagtccctgaaatttgcaagaataaaacatagcgttgggtttgaatacaatcataatgtcagagctctggtttagatttttgcacaggtttatgtttattcccccagttgtctgttcattcattcattcattcattcattcattcatgaggcatcctcatgctcctgaaagtcatgggtttgtggactcggtagagcagaaacgtttctgtggagttcccagctgtgcccgggaaagtgccagggggacgtgcgcaggcacaggacacagcacaggagctgcagagtgaaagtgcatgtgacaagcgtagcccacaacctcctggcaaggggaagcacgtaaacaagaaatcagtgtttcgtggaggtcactgtgcagcgcttgggaactagagacaaaaacgtgtccctgaggcagcccagtcaaggctgcaggaggaggcgatggcatcggagctgacctggggggtgctcaggaatggccagggtctgacatggggatatgctaggctgggtgccattgcaagcagaagcttcagacaagaaatattaagatagcatgtttggactctgagtcacagtgaaggattggcactttggttactctaagagaaatatatacatggtttttaattgattttcattgtacagttatcagatgacttgggttcatggactggtttgtgatatcctaattttgaaaacactctcttgtttctacctagacttttggatttcaacagtgcagttggccatgagcaagtcgacctggacacctgctggctgtcagaaaggcctaagctggctcccgatgcagaggacagcaagctcttgccagagccccgggcttttccagtaggagcggcttcctttactatcagtcaggtccagtcagcaaaggagggcctaggacagagggagttaaaatggggccttgctgtaaaggtgcctgcgaaagctggagctggagctggagctggagctgtgctaaaaatcagagcggggacagggagggaaagggtgcctcaagcaactcagatgacacggcccaatccatagattgtaggccccaacacccaggccgcgcattgggctgatgtataatatgcttttggcagagcttctataaggactcattatcaatttacatttagccaggaaagcatgaaaataagtacttcatgtaaagccattgtgcacatatttgttgctttaaaaaaaaaaaaagattcaattcattaggaaaagccagttctggccaaatattttgaatggcagccattgctatttttcatgttctccccttttgctttctctgtttccctggtttaaagtgtgcactctaataatttagaagatggcagaagcattcaagagcaggaccttctgagcagggcgaggctttgagttcggggcagttttcatggtagcatctgcctgtgctgaagcagaaaacagcatctgggacccccatgacttgggcactcttaggacagcccgcagatggttgcgtggggttcaggggcccttcccgcctggctcctcttgtctgcatcctgccctgtcagtgtggacctaggttcacactctgaggccctgcaaaacatgtcacctgtgggcacctccagttttccagtgcctggtccgcagctcgtctcggcagctgcatccttagggccattcccaaaacctcgggtcacggcgggggcctagggggacagcaaggcctttgccccttaagcctgatgaaaatttgtaggagagacttcagtgtccttatgaatttcagtgaagccgagtgggattaaggtgacagacagaagctctaagtgctttcttcagggagataaagcgctggcgagtgcatcatttaaaccgaagatggagtgagcgccaacaggcactggtggttgttgctgttctaatgggattgcttcgtagatggcccttcatggcggaacacgcgtgtgtcagtggggttcgggctgcgggtggcggctgagtgtccctgtgtgtctcttacaggaacagtgtgtggtggatgcagctctggagtacgttcccggcgctcaccagtttggtctcacacaaaacagccatttcatcttgccttttaatcagtcggctgtcagaaagaagtaggtatcattctaacatccttatgcggcgtctcattgctagatgtatgggggtgttctgcagccacagagtcttttccaaaagaacctgcttttattttatgatgaagtgcttgatttgcaaccaaatggcaaagagaaggaattcagtgttggtgcaaatcacaacgctttcatggtggttcactggggagtctgtggtttctgccttttcccttctggagagtggctggcttcccctttctgtgtgcatgtaaggaagcgtgtgggcatctaaattaagtctcctggatctattattgtctggactttcaaccccattccactttaagcattccctagtctgatgtctttgtctacccaaactcttacactgtggtggccaaaatcccgagtgccacacccacccctctctgcaccttctggccctcatacctgcctgtccctgggacccttctgccaagggaagatctcaaggcctggagcttggggctcccggactccatgttgctcctctctcctcctgaggtcctccagctcacctgccaggcttgcctgcagtctctgccatgccctgcccgtcttgttgtcattggctgtgccaccctgtcatacccccttagacctgggctcctgtctgtcttctgcagctcctgccatcactctctgtgaattcaacagctgcctaacacctgacctttctgtgctcaaactgtgatctgtggaaggtctttccctgctccctcctcagccagcctcttccgtggccatacccttgacttcttcacaggtatccatccctctcacagtctcgactttaaaagcctcctattagcacacccctttcttcttgtctccactctgtgcctccccactcctgcagtttctcagctgcatggagacctctaagccgctagccctaatgccctcccaccactatctcccctcttctctagccccaaatcacaattcatcccccagataggttccaggccagtgttacaggtgtcctctgcaaaatcccctaaccctttctctctcccactcctgcgagcccaggtaaaagccaacattccgccttctctgtgccagaacccacacgggagaccaaggccaaggagatggatgtctccttcctagctggtttgagctggatatcatagccgtcaatctcagatggagcctccaaacgacatggggagccagtgcattgctctaatatgttcatggtttttattctccatgactacttcctcatagctgctcttagctcagagccctgtgcaccgcagtccctcttcccaccccagctgatgacttgcctcgttgagaagaaagagctccttcatccgtccaccaccaaaaagaccagcccctgcttttgttcctgaccctctatctcttctgctaccacagatgaagggtacttgttcctagcaaagcccacccagccagccccagcttgtcctctggatcccatccgccctctcctcctaggacatgcacagcagccactcctcacagaccagcacacagatgccgctgtcaccccatcgtcagcagtgacagcaagagcagcaaactattgtgctggaggttgacacaaagatttttacacagatgccctaatttactcctcataattctcctatgaggaaggaattgttattatctccatttaacagataaggagattgaggtatagggagcctgaggcatctgctcaaagtcacacagctggtaaatggtagagccgggattcgaacccaggccttctggctccagagtctgtgcctgtagagtagtttccccttctcctcgggggatacgttcaggacccccagtggttgcctgaaacctcggctagtacctaaacgtcatatacactgtgttttcctatgcatgcatatctatgataaagttgaatttataaattaggcacaggaagagattaacaataataataaaatagaagaattataacaatatgccagcatcactcctcttgtgcctcgagggcattattgagtaaaatcagggtgacctgaacacaagccccgctgtactgccacagtcgatctgcgaacctagacagctataaagtgaccaatgggcccatggctcctatggtgtggatccgctggacacgggcagacatggctcccatggcgtggatccgctggacacaggcagacatggctcccatggcgtggatccgctggacacaggcagacatggctcctatggtgtggatccactggacacaggcagacatggctcccatggcgtggatccgccggacacaggcagacatggctcccatggcgtggatccactggacacaggcagacatggctcctatggcgtggatccgccggacacaggcagacatggctcccatggtgtggatccactggacacaggcagacatggctcccatggcgtggatctgctggacacaggcagacatggctcccatggcgtggatccgctggacacaggcagacatggctcctatggcgtggatccactggacacgggcagacatggctcccatggtgtggatccactggacataggcagacatggctcccatggcgtgaatccactggacacagacaggattcactttctgggcaggaccgagtgggatggcatgagatctcatcacgctactcagagtgatgcccaatttaaaacttatgtattatttatttccagaacttcccatttagtattttcagacctcagttgactgcaggtaactgaaacctcaaaaagtgaaaccttggaaggcaaaaccgcaaataagaagggactgctgtaacctctgtgctgcactccctctctcactttgacttctaaagcagaaccccccaggagacgtcacattcccccgcacacacatgcacagtacctggctctgtttcccagcaaggctcttgaaagagctgccctttcctcagggactgtttcctcgtttaaccatccggtcagcctcccgcacacccccagctgctcttgagagagttactcgagacccctgtgcagctacatggtgcggagccccctgcactgggctctcagcagcccctggacttccttggctgtcacagatgcacactctcctagttccctgctctctctcggcccgccttcctcagtctcccagctgagagtgctgggcccttccacacgctctcccaggatggccttctatgttccgatcaccttaaaatgccacctagatatggcagaacctacctgtgtagctctggcctccacttagaactcaggatttgtgggcccaccagccactcgagatctgcatgtggactgggacaggttcctcagccactcaacatctctgtgtggcctgggacagtctcctgggcctcatcaccccgaatggaattcgcaggcttccctcagtcctgctctcctgctctttgccgttgccgcgggcacaatcaccattcacctggttgcccaaggcccaagcctaggggctatttttcatttcactttttctcactctccaaatccagtccattggcaaatcctgttgcttcttcctccagaacgtttcctgaatctgttctgagtccccaccgccaccctggtctaagccacccgactccctcccgttggctgtcgtaacagctgcctgatgggacccgcttcacccctgaccccctgacctgttcttcagtttagacagaggatctcttaaaggaattctcggccactccccctttcaaagccctcctgtgacttcccactgtgccgaaaatccaaacaccctcaaagcccctcctccctatgttggagccacatctgccctggtgctgtccctgggtggtccagtgacaccgtggtccctctgacagggcctacccaggcgcagccttcctccacacctgcagtaactctggttcccccacggcctcaggtgggcttcctgatgtcccctgccatcaagctctcactttgcaggggcttgcccctttctgtcattcagacctcagctgagatatcagctttgcagagttacccgcgttgaatgcttaaggtagccactggttggcctctacaggacccactttactgtctgatgtgtttctgtattagtttcatgagcaaagggatcttcctctttgttcacagctttatcctcatcctgaaacagttcccggcagacagaggtaggcactaataactcattatatgaatggatgtgtaaatggatgaaggaatgaatacccctctctcctgagatgttcaatgtaaacgctgaaacaattgttgggtcctcttttgaggttttaaaaatgaaaagtaaaagtttcctttctcaacgctgagcacttgttttccccaggctctcggttgagctaagcatccgcacgttcgcctccagcggcctgatttactacatggctcatcagaaccaagcagactacgctgtgctccagctgcacgggggccgcctccacttcatgtttgaccttggcaaaggcagaacaaaggtctctcaccctgcactgctcagtgatggcaagtggcacacggtacgatctcaggaggcttgtggtggctgcttctgagttctgttccatctatcactcgggttcactccatttctcaaaggcacattatccccattaatctctatctcgccgtgtgtgtctggtgtctcccccagagactacaagtcttgaaggcagggatcttttctgcttccgaaatatccccagggccttgcttagtacctgacgtgaaatagacattcagcaaacattggcgggatgaacaaaaggtactagacatgttcttgacttggcaaggagtatgtaaagcctagcctcccctcatggcatttgctttctgataaccggaactctggagcactttctggtgtgcagcacgctttacctgtgcctgtaatcggccagctgggttgttcttgtccactgcccagaaaagcaaatgcactaagagtggcaggttttgcagcaaagaaagagtttaattattgcataggcaacttgccaggagataattctcaaagccgcctccccaagaattcaaggactagggttaaaacctcgtgtaaacaaggatagtttggcagccgggggataaggaatggcaaatgctgattgattggattggggaagaaatcacagggggtcgaagttgtcttcttgtgctgagccagttcctgggtaggggttactgctctgggtggtgccatttggttcatactgaatgcaaagtctgaaaaatatctcaaatgccagtcctaggttttacaatagcaatgttatctatatggggcaattggagaaggtataacacttaacgactattggctacgtgattcctaagcaataagtagtttaaaagggcaaagtataaacaatgactggttagagtttatgcctacatcttagcaggagaaacaatggctggttagagtttatgcctgtatcttagcagaattcaggcccctatcacaattccaaccttgtggcatttccttaattttacaaaggcgattttggtccctgagcaaggagggagttagttttggggagggactgttaaccatctttgttttaaactgtcaactaaattcctcccatttcgggaagggactgttatcatctttgatttaaagttaaactatccactaaattcctcccatttccagaagggactgttatcatctttgttttaaactatcaactaaattcctcccatagctaggttgaattagcaaagacagcttatgaggttagaagcaagatagagtcagttatgtcagattcctcttgctgtcatttttctatgtcagatttctttcactgttacagtttttgcaaaggcagtttcatacctgcctcctttcttctgccaggctcatccacttttcgtcaccaactgtctaaaaatttgaaccttcctttagcattgcattcaggttgttatagctctcagaaacagatgttgcatctgttaaagtttatacatctgttaaaagttttttcagattcctcaaaaattatgcatgttttcactttgctgtaggtcaagacagactatgttaaaagaaaaggcttcataactgtcgacggccgagagtctcccatggtgactgtggtgggagatggaaccatgctggatgtggagggtttgttctacctaggaggcctgccctcccagtaccaggccaggaaaattggaaatgtaagcagcattttccatactgacattttaccttcgttgtgttcgtgtttattttgtagaagagcatacctcacggcatctttatgtttaaattaccttgtttgaacctggggcttgtgaagaggtttactttgcaggcatgtccacagatcgtgtgccagggccgcccctcagaacccgatcagtctttccagcctgttagttaatgaacatctccctttccgcagccacgtggccacagcacaattcagggaagcccagcaaatgcatattcgcacattagtaaactcagcattttttgatttccacaatatttcactaaaataatagaaaacacttccactgcattattagcaaagatactcaaatggtagctctaacttagacattcatgtgaagtattgtggcaattaaagttttaaaacaaaaagattacattttaatgtgttttgctgagaccagtctgatgaagtggaaggaaaatgtgtccaaacccttcccattagaatcaccactgtctactcttgcatgtcatttggcttagatcacccacagcatccctgcctgcattggggatgtgacggttaacagcaaacagctggacaaggacagcccggtgtctgccttcacggtgaacaggtgctacgcagtggcccaggaaggaacatactttgacggaagcggatatgcagctcttggtatgtgttagcaacactctcgaaggcagtccccgaatgagtctgtactctaaagcgatgtggatccaagagtataagacaggacccactggacaaggctgcaggaaaaccacattgagtttagtattccagttgattcctaatttcttggcgtaaaaagccttctcaggtcttgtgctatctggatggcctgacaaagtctcccccaaggagtggtgtgactcctgacagaggccagacatggggtgctagtttcatctatagtttccccaggttctgtaatgcacacttactgtccaagttaagaaagggctttgaattaaaaatcagcagcataaaatgtctagaccagctggcgccagggaggctgtgcagaagtttgggtggggaagagggggaagccagcagaacatctctcgttcactctgtgcttcctttctcctgttcctggggctcaggctccagccctgctgggcagccccctccatggcctcagctccccttgcaccccccagctctgggcataccatcttctccccttttcccttcagccctgggcatggtaacaactgcctgctgttgtcaatagccccacccagtgtggctcctcggcttttttatcacctgaattaaaaaagcattccattcaatccccacctttaacaaacttagtatggactctgatacactcagtaaatgatgattcccacaagtacacagatactaggaaaataaagtggactattctcggatgatgataaagggattccagggatcaaatcccaacagcccacgggaaagactgccgcagggaggacgtgtccacagggtgaggcagggccacgtgcttctgtggccacagatgaaggaggtgcctggctctgctctgacctggctgactgcatgcgtcttctttaaaagctccacgtcatctcccagatgtggaagccgaggctcagagggcaggagtgacctgctggtggggatgcagctggatccaaaggaggagctagagccaggtcccccaacccctagccaggaggccaaatgctcaacctgggcctggcagcgctcaccctgacttgggtcctccttgtgtgttacagtcaaagagggctacaaagtccagtcagatgtgaacatcacactggagtttcgaacctcctcgcagaatggcgtcctcctggggatcagcactgccaaagtggatgccattggactagagcttgtggacggcaaggtgggtgcttcctctccatgagggtcttcctccccccagtgtcagagacagagcaattgagaaacagcagattcaaattcacaactatctattttcatggagtcaaacaatggtcccattactattttaaaaacagatattgctacaagaaaacctttttggtttattttttaaaagcttttcaaaaataactttttatatgtttgaaagtaagctttcagcaaaattacaactataatacaaagaactttttttcctgaaccatctgagaataagctgctgacctgatgccctatcccttctaataattttttttaactttttatttggaaattattacagattcataggaagttgcaatgaaatgtacagggagggccccatgcaccattcacccagacccaggtttcccagtggtagcactatgcattttttttctttttgagacggagtttcgctcttgttgcccaagctagagtgcaatggtgcaatctcagctcactgcaacctctgcctcccaggtccaagtgattctcctgcctcagcctcctgagtagctgggattacaggcgtgcaccaccacacccggctaatttttgtattttttagtagagaccaggtttcaccatgttggtcaggctgttctcgaactcctgacctcgtgatccgcccgcctcgcctcccaaagtgctgggattacaaacattatgcatttttctagcacaatcaagatacttaattgtatcaatactacaaggctcccccttaataccccatcatggccacacccaactcctgtacccctaatcctaggcaaccactaatctgtttgctgtccctctaatttctgttttgccagtgttatataaatgaaataacgcagtaggtatccttatgagatcagcttttcacactcagcctgatcttgggaaggtcatctgggtggttgtgcatatcaacagtccgttcccttttgtggtggcgtattactctgtgggatagacgtaccatgctataatttttttttaatgtagaacatgttatttttttctgtgactgttctgcccttgcttttcagcctctcatgtccctctcctgctggcaacaaaatgaactccacaatttgcagtactagtcctttagtctcctgcttgaaaaccgcctccttcacagtttctcccagttctcacttcccttcctctcccctttggggctgtctgggcgcaggcaggatgcggggaagggagtctcgatggcccttttcctttctgtgggctctctagtggacagcagctgagccatagccatatcgtggtcttcagggcagcctcttacagtgagtggtctggggtctcagtgttgcccctgcatgggggctgctcctggagagtttggccagcgtccatttcagctcaggcttctcatcctggttgtcatgagtagtgccacctcttcatcttcccgcttccccgtggggtcatgtgcaaacttggggatttctgccaagccacacagaggccatggggaatcagggatggtgtctctctggtcctctctctacctaactacattttaccagcatttctgcagcactgtggtcaatgtttgttgttgtgggagtaagatgcctgaattttccaacactagtgcctcttggaaggcaaggaaaaagtctccatgttctagattccccaggacttaccggttgtttctggtatttccctacttactccccgctgggttttgacccctaggatatcctagagtgggggtggggaggatctgaaaggtcatgtctgaccttttgcccttcacctcttttccgattcatgacaaaccagaactaacttgatgtcatattgctgcctctctacactgacttacagccaactttttccctcatctatactttaaaaacttttgtatctatttgcatgtttttatgtgacatctaaaaaatgttaccagggccagatatggtggctaacacctgtaatcccaaaaccttgggaggctgaggcaggaggattgcttgagcccaggagtttgagaccagccagggcaacatagcgacaccccatctctatttttgaaaaatattttatttagataaataaaaaattaggaatgcaatcagaagtgtaattgctgcaaacaatgtaattttctgttgtattatacattttacttcttattggattattatgcatagttcttttttaacatttttagttgttacctaagggtttatgacatatccttaattgtcacagtccacctagaaataatactgagcagtttcatatatagcataagaatcttcaaaaagtacatttgaaattctttcctcctgtcttagtctgcttggggtgccagaacaaagtaccacagactgtgtggcttaaacaatggaaatttattttcttgccactctagagactagaagtccgagatcaatgtgttagtaaggttctttattctgaggcctgtctctttgacttacagatgcctcgttctccctgtgttctcacatggtcttccctctgtgcatgtctgtgtcctaatctcttcttataaagacacagtcagattggatgagggccaccctagtcactcatctttacttaattacctctttaaaagctccatcttcaaatacaatcacattctgaggtactgggggttaggacttcagcatatgaattttggagggcggtcttcagcccataacacctcctatcctttgcaaagctgagatctctttacttgctgtgggagagcatctacagttcatcagaagagagttagtaaatattcgctcataggtgctatcaataggtatgaccgggccaggtgcggtggctcacacctgtaatcccggcactttgggaggccgaggtgggcaaatcacctgaggtcaggaattcaagaccagcctggccaacatggtgaaaccctgtctctactaaaaatacaaaaattagctgggcatggtggtggatgcctgtaatcccagctatgcgggaggctgaggcaaaagaatcacttgaacccaggaggtggagtttgcagtaagccaagaccgcgccactgcactccagcctggacaacaggagcgaagctccatctcaaagaaaaaaaatgaaagtatgaccagcacctccagtaaggctattagctcctaaaatgtcctaaaattgaggccctcatttaaggatgcagtgtgctcagacttgtggtcatgaaggtggccatttgcgctttctggaatttggggactagtataacatctgaatcttttttttttttttttttttttgagatggagtttcgctcttgttgcccaggctggagtgcaatggtacgatcttggctcaccgcaacctctgcctcctaggtttaagcgattttcctgcctcagcctcctgagttgctgggattacaggcatgcgcctagctaatttttttgtgtttttagtagagacagggtttctccatgttgctcaggctggtctcgaattcctgacctcaggtgatccgcctgcctcggcctcctaaaatgccaggattacaggtgtgagccaccatgcccagccatcatctgaatcctttaaaaggttacttttcaaaactattttctgtttctcctagttagctctccttttaaacataatgctgcaattttatctactccaagagcttatacaaatggactgtgttccttaaatacacaaaaactcaccaagatatttgcttttaggtcttgttccatgtcaacaatggtgctggcaggataacagctgcatatgagcccaaaaccgccactgtgctctgtgatggaaaatggcacactcttcaagctaacaaaagcaaacaccgtatcactctgattgttgacgggaacgcagttggcgctgaaagtccacacacccagtctacctcagtggacaccaacaatcccatttatgttggtggctatcctggtatgtacgggtacctgctcttccactcaaaaggggcactgtccctggaggaagtcttggttcaggtggatgtagaatagggattgagaaaggtacatggtttgggtgacaaatcctttaccattttagaaaggctatttcaaatatctaagaattcttggataacttaaaataatctacatacacaagttaatcattgggtaagactgtgagaacattgggtctgatataaaggcagccgtatgactctaccgaagtaaatttcatgactgtcagacttgggagtcattttagggctagggaatcgttttaggaaacaaacttgtgactcatctctctggtcaattttggattagaattatgtattttagatgttccaaggaattgttgcaaataataaacacctgttgtatgactttttttaagttataactatgccttaaaattttatatattaaaagtttttggccaggtgcggtggcttacacctataatcccggcactttgggaggccaaggtgggtggatcacttgaggtcaggagtttgagaccagcctggccaacatggtgaaaccctctctctactaaaaatacaaaaataagctggacgtggtgacgggtgcctgtaaccccagctactcgggaggctgagacaggagaatcacttgaacccgggaggcagaggttgcagtgagccgagatcgcgccactgcactccagcctaggtggcagagcgagactccatctcaaaaaaaaaaaagttttctctgaattctgctagtcactgacaccacatatgtggaagatattctcctaattttgatagtgaaaaatttaaaaaataaaaaaacccgcttgagattatttctgttgcttttgtgctatggatcgcatttcaacaaaattaagcaagatttgtcttctcttctttcctgaacagctggtgtgaagcaaaaatgcctgcgcagccagacctcgttccgcgggtgtttgaggaagctagctctgattaagagcccgcaggtgcagtcctttgacttcagcagagcgttcgaactgcacggagttttccttcattcctgtcctgggaccgagtcctgaacttcaagcagaatcctcagttggaatcattgctaatattttgaggagaagtgtatgtgtgaattaagaatctcttcagttcatatttcatttccaactcaggttaagtgtttctggggagagatgttgtgtttacgttacactaaaaccacatgtgcaacaaatacctccattaaatggtctaaaatgtaaattgaattccctggctctctttttaaacgtatttttaaaaaaatctttatacacattgaatgttctgttgattacttgatagtattttatgtttttcattttgagctttttaaaaaagtatcaatacagatgataacagatca

SEQ ID NO: 85 - DNA, 125513 bp, Mus musculus strain C57BL/6J
aggacagacctgggcgcagcggggcgcctttgggggaggtcctgggtaggacaggggcggggcgcggccaggcaggcgggggtgtgtccgaagggcctgcgcaccaggccagggtcgagctgggaagagcacactcgcgcagtgcctgtgagcgagcacgggcgagaccttccccaggagcgcagggagcggcggcgacaacatgcgcggcagcggcacgggagccgcgctcctggtgctcctggcctcggtgctctgggtcaccgtgcggagccagcagagaggtgagctccgcggcgggaacaccgctgaccctccgactggcgagcgggagcgtgcgggcgcaggggacaaagcgcggcgctcggggctgtggatgggcgcacgcaccctggcgcagcgcggacctgctgcgggccgcacggggctgcagggactccagcggaagccgcctccctgaggacgctggctgctccctggagctctaggctctggtttcctctgactctaggggtcacctgctttctagcttagtgggaccttgagatccaggagtacagtgggtggcgagagtggcgtgtccggcacgtgagaagggacactgactccgtacccaacgcctgagtggctgcggactggccggagaccgccgggttggttgattgtatgcagcgctcccgcaatgaatgggaacggagttctctggcattcacttcattgtcctgtgttgcagagagagaccatggaaggagaaaggccggctcctctggggcactagcatccagggtggtctagcgggaaaagactgatggagaaggggttccaaggtcagctgtcctgggcaactgggacccgcatatggcgtccaggacacaaatgtgttctctaaagtgtgctctttgtgtactctgtaaagtgagcaaatagactccccacgcgtgtttaaattatgtgcactataaattatggcgtaaggggctagaaaggtcggacagtgagtgtgtcggctctccttggaatcagtagctttctttacaaggttgagaacagaagccaacccaaagtgaattttcagtgggcactggagatgggaggtggagggacagagaatataccatgccacccagagttatctgcaagcccctgctaggtggtcacaaatgtttgtcgaaaacgtctcaatgtatgcaacaagtgacattgagtgtgttcccacagattgctctccaggagcacaggttaaaagtaggaggccgaactcgaaatgccctcgtgggaaaaatgtgtgtttgggcattgtgcagagccgtgagctgtgcaggctatgagcatcccattcattcatgcattcatgatgaaagcgctggaccgagctggaaacgcagctttgaatagcccggcggctgctcagctcaggagcgggggctgggagaggggaatttacatagttatcagggaaagaaaagagccagcctttgggagggaagcttttgacgctgagagcccaactcctgcctgtgaggttgctgaaagtgaccaaatcagggttctcacagggtggagaaagcagcttgccttggtttattgtttcaagacattgaaagtcttagactgaggagatgctctgaatgccttccgttcccctgagggctgggtgcttggcctgggtggttatgaatggtgtttggagaaagtggactgcgtggggctttcctgctttgagacactgcagaaaagctacgtcaggcagggcctttgaatcgctcctatctagtctatatttgccaacccacagctttcctaatgagtatccttggaagttttgttccctgtatggctgatgaaatggcatgatttactctctctctctctctctctctctctctctctctctctctctctctctgtgtgtgtgtgtgtgtgtgtgtgtgtgtgtgtgtgtgtgtgtatactagcctagatctcatgatgctgccctggttggtcttgaatttatgagttcaagtcattcccctgcctcagccttcagagcagtttggactgcaagcacgtgactacacctagtggggtgcttacagttttgaaactgatcacggatctaaaagcatgagatcattagctgttcctattattcctcggggattgctttacaactaacaatgtctgactccttggctgaaatgtaacctttaaagtgagatgtcctctaagtattggataagaagggttgtgtttccaggactgtgggtatgtatggctttgcggtagagcattttgtccagcctgtacgttcaaactctacctagtgcagcccaaaggaaaatccaagctgccgtgtttttttaaatgacatgctaacttcacagctgattatttcaattggaaaacatctaagagcagaatgctcaatttggtaagtggcatgttaagttctagcaggtaattagtcaaatggagttccttttctgtagcccgcttttctaagtacagggcagtaaggtgttactggagcagttagaaagtagggtctccatattaagacacctctgccctctccccacaaagcctgcgctcccaccttgcttttgcctgtttcctagacaatatgcatgaggtctgcctttgtagttactctgtatgtgtagtgagcacactaaggccagaaaggtgtgaagtggacagagtgtcctatgtagctcttagaagtgtgctatttcctaagcttggaagatgaagtgtgcatgtagctacatacttcattgtaacgatgctcgaagctccaggttgttcatgaagcccagtggatgatgctctttatcacttagagcaaattctctgggaagcaatgcaagcaataccttccacctccgggtacctagctctgtagcgttataggccactatccgtggtaaattactgatgttctctgtggttgagtttcaatattagtaaaatacgagtagtaatcatgtcttccaggaagcgatgttcatggttaactgggttaatgtagaaaaagatttccaaagtgcatgaaatacagctaggctgtgataaacattgtataggatgatgatgatagtgatgattcacagtgttatgtggggaaggccctttcccaaaccatattgtctctacactgttaaaaaaaaaatcgaactctgtatttggagttaaattgcattaggttcggctgctcaaatgtgttactttggttagccttgactttgttccttaaccttcgtgggggccaatctttcatcctcagtggaaagactagcttcagaacagttgccttctctacttggattttccctccacttccttgtggtattattggatgctctcgggttgactttctgggtacacaaggaagcatacttcttctatgttatgaccccacctatccttattccctgtgtaggaccaccttacgaactcaaattgttcccccatctcctcactttcagggtgtccacaaatgccaccatggtgctgtatcccactggggtaagcccaggaagctagaatgcaccctggcctactgtctcacagctgagggtcttgggcaaacccatacccgctcactgctctccagtgtctacccacacagactgaaaaatgctcccccagtctgcagtttgggtgctagagacctgaaagccttccataccctctgccccaaactccagggttacaaaaacgcactcaaggatgcatagaaaaaggccggtgatggagtccaccgttgtctttcaagacagccacctcctgctctttctcggctgtccttccagcaccaggtctctccttgggatgtttgagcaggagctgtttgtgaaagttacttctttggtagctgcgatgatggtttgtagttaaagcatggctaacggaggagacatatgaaccacaccctgacactgcccaccctgtaagagctacctccgtgtacctccagcagtttttaatattccctttactaatgtgtgctcttttacagtggtgaccttttatcttaacccatcttggacagacaggtgttatcagacagggctttctatacctttcaaattctaagactggattgttggtttaaacactgccaacagtgctattcacagtaagcagtgttaaagggctggttcttcttcttcttcttttttttttttccttcatttgcacatagggaattgatggacatatttgaggctacttctggcacagagaaaggaagttctggcatgattcagtttgatcgttaagggtacttattagtaagttctcagacgctatatgatgtcactgctactccacggcagacatcgagtaactcaactctttcagaagttattgttaatgaataaagtttgagtcttcaccgtgagtcctaacagtaatggaaggcaaacagcaaaacctcggcagcataggcctgagttgaagtatttgttagctctgctcttcaggaaggtgtggatgagctagacacactgtgggctcccaaggaagatagacacagcttatttacacacttgtaagggatttttttttccaacccgctttttttccaatataataatagacattccccagacaagcaagtaatcaacgcatcgcaaaattaatgagcaggaaaaaaatctccttcctagaagtttagttaaggtcatgaactttggttctgttggagcccgtcaggtagctacttcagcataaagcaccgcacaccagctgggttcattgcattcccccaccccctttatatgaggggatgacagtcagtgctcacaataagcgtttaataataaatagcgcagagcccttccacttggtctttgttttgtcaaggctgggtcaggagcgattgctttctctctcgggttaactggttcccactcttgcgggggggggggggggaggcacagacaatgggagcagtgtggagcttagtggacgataacattcttgtctaggtaagcatttatctccaagtgttaactcagaaacagtggcagaggcgtgccaccgaattatcagcatcgtgattttagtttgtgtgcacattaaaaaaaaaaaaaagtcattcatttgaagtttcaatccttcattccagaagttatctgtgcagtctgatctgctgactcagggggccgtaaattcttgtacctcttcaatctctagtggtaatatcgcctttagatcagtggcgatttatagacaggccagcttttcttattcctgaaggtatttcctgaaattattttttccccatggttccataatttcctgccagaaccttaggcaattctctgcaatcataaagatgtgaaaggacacattgaaaattgaatagatcatttttaatttacaaaaagaaaaaaaaaaaggacattctgggccacagaggtagctcagtggatgaaatgcatgctgcccctcctgcctgatgactgggagtcccatccttgaaactcacatgatggaaggagagaaccagtaagttgcccttgacctctacagatgtgctatgacaacacgcatgcgtgcatccatccgtgaacatgcacacacatgcacgtataataaccatgatgctggttgcaaggaatcacccaggaaatgtcttagacccttttgataaaaggtagaactttacttataaaaacgggtctgtctcaggtccagatgaaggagttcttccttcgcagcatccctgctctctagccattcatgccatctttctttccttaccactctggttgaactatgctttcctggttttttgttcttttatgccattgatccaacttgtttttctaaagttttatttctttcttcattaaactctcccccaccccacgtctgccttttctgttttcattagaaatagccattagctgcctgaattatctatcagccaggtgatctagtgtcatgccgcagttagactcatcctgctaaattaaccacccactgtcaccatatggcctctcccctgcctcttgagcttcatctcttgcctccctgctgtgacctccccccatactctgtctaaattcagccccaaccaccagccttatcctagcatgacaccctgcctccgagtcagggttgtttctgtctgctgcacagctgttgagaatcccctcacctgagctgcagtccagggccaacctcagcccatccctacatttacagcctgcagctcactgccttacagcttgggtcgactgcctcatctctaaatctgcactggattctgtgctaaattggggttcccaatacagtcacagttcttctctgggacacttttgggtggtttatccagaatgccattagccagagtaaaaagagaaaggacatttttcttacacttctcagtatttcttaatacatatggaaaatcagagtcctggctcttgggtcagtggaagtgaacaacagtaacacctattgtactccagcgtgcagataaagagttagatgaccataggcacttcctaaatccaatcatgccttttgttagatgtcccttgggttcttagtacttaaaggggtgaggggaggaagcgaaaactaacttcacatggaatacagttgttagccgaggtaaattaatcacgaggcgagctgttctcttaagatgaaacctctgtaaagcccaagtctactttatatgatccattctcagaggaaactggcaatgactagcacagaaaagatgtcggtgaccaccagagcaagggtgggcgtgacgtttgaggcctccggtgctgaagttgcagatgagccttcagagttgcaaagccaacaaggagaatgggatcctctcgaaatgtcggtcaaactctgagcttacacgatatcagggatcagatgagatgtggtacacattccaaagagagggatgctcactgcaccacctgtgggacctgaaaagaagtctgctcttgaacgaagtagaaagactaagcttcaaggccaaaccatctagcaagccactcatgggttcaggacgtttaaagatatgtacatctccagagatggcacagaaaacccatccctggctcctacatggccaactcagccctgtgcctgactcgtagagctttctagatttcctttgacccaatagataggagccagaatttatggatcaaacgttcttattgactttgatactcagaggcaccggaccctctttcatcttcagttccaccctctgaggtttctagtttaaatatttgtttccagaaaaatctccgtcacttctctgatcttctgtactgtctctgtgtcctgggcatgggtagcattcgtctcccaattctgaaaatccctaatctattctgttttagtctagcctttctttgcttttgaaggccatgcttctccgactcctaccactctctctaccccaggctttacagaaagcgtatgtttagtctagaagttccgaatgggtggtttcaaaagttctgcttttgggaattgcttccactttcctgtaaggaataaacagtttcttgcttggttttgtgttttgaaactgggtcttgcatttttgcctgggctggtcttgagtttctgagctgcagcgatcctcctgcctcagcttcccaagaagcaggactgcaggtgcaaaacttaataacttccttaagagcagaacaatactcagtatggggttgctgtcatttctattctgcttgcttgtttcttttctgtgtcttactccttcatacctgtgtccttgcatggaggtcatgttggagcgatgtgatatggcatatcttggaggttttgtgtcctagctagttttatgtcaacttgacagatgctagagttgtctgaaaagagggaatctcaattgaaaaagaaattgcctctataagatctagctttaaggcatattcttaatgaattattgatgggagtgggcagcccttagcgggctatgctagccctggtttggtagccctaggtgcttatctgaaagcaacttgcgcaagccatgatgagcaagccagtaagcagcacccctccatggcctctgcaggttccagcctgcttgtgttcctgtcctgacttccttcttcgatgaacagtgatattgaagtgtaagccaaagacatcctttcctccccgagtttctttggtcatggtgtttcatcacagtgatagcaaccctaagacacagttccctgctgccttctttgctgtttgtgaatcaacagctgtgaggacatttctcgtgatctatctggatttgctttcgagcctgtgaggctcaaaagtgtatgatgtttctgtaacataattttcaagaaaggagttgagggactgagtcccaggtagacttgccattcaggtttcatagtcggctcttgcctgcaggctgtgtcccgtgtctctatttccttctccttgaagaactcagagctgcaggctctttgggtgccaggagagcatttttgaacagtttcatacaagttcccctttcagtttccacataagactttaataacacagatccccaggtcctaacccggggattataatgtatttggtctgagatgggacctagtcatttcgtttttaaaagactctcttagctgattgggctgtgctaccaagattaaaaaccacccagtgaacttgctgtgtggcagacgcagtagcagggggtaggcatcctggacctgtagagacctcttactccttggtggggcgaatgtgtctgtgttgcctttgttcctggtgggctgctcttttttgttgttgttgttgctcctatgtttaagcaagcagagttccagcttggcttgactgactcagcaaagtcctgatttcaaaaatacttttgatcaagtcacagggtccctcgtgttctgggataagatctggggggtactgtaagggactgatggatcgactgcaacagaatttattaaatacattccacattccagttcttttctcttttctgcctcgtgtcccttctttcctgtcttttgttttgttttggtttttggttttttgttttttggttttttgttttttgttttttgttttttgttttttcaagacatggtttctctgtgtagccctggctgtcctggaactcactctgtagaccaggctggccttgaactcagaaatccgcctgcctctgcttcccaaatgctgggattaaagacgtgcgccaccactgcccgacttctgtttataattctaatacctcgtccagcacccagcagcgacagttctggggggactgatggacgagagaatgccccagtgcaaacagcagggtctggagaggagtataggggacatcacttagacattcagacagataacagggagatccaacctgaataatagccttctggaaggatcgggctagcccagggtggctggaacctctgagtcacccagagaggccttggagagagaacagggaagagtcttgctatcagtactggggcagaggtgaccaagcagtgttgagacccaggcctgagttcaccatctagagtagcacacacgaataggaatctcctggaaggagaaaaactgtaagaaatgctttggcttctactggggctagcagggactctcaggccagccaaggtagccaaatgcaagagctccactcaaactcaataagtctctgacttagaaataaggtgtggaggggttgaggaagatacccggtgtagacctaattcacccgatgcacacacatgcacaacacatgcacatacaggcacagacacggagggagtgtacgatgcattattcttgccttctgcgggtgttattaaacattgctgttatttatctgtcttattaaatctcccaccccattccttcccatgtgggagagtcctcaccctgggtgaatggccctgcctttgccctcatacaatcttttgaaaaccccctttgccttcttctgtctcctagatccaaactgtctggtgaagcagaaattcaaggtctaagacacccaagggacagcttagcaatttctccaaagcagccagtcaggaaattatggcagcagttgttttcaatcgatagaacattttgggaattactgcttagtgccgtcaagtctcattctacaaatcacatatttttctttgttcatcacagtctttaatttctctcagaaagtttctgtcctctttggtgtattggtcttaaatttatttcatgatatttgtgtgtgtgtgtgtgtgagagagagagagagagagagagagagagtgtgtgattgaatgtatgagtgtatgtttatatgtatgtaatatgtctgtgagtgtgtatttatgtgaatatatgtgtgtatgtgtgtgtttgaatgtatgagtatatgtatatgtatgtgggtgaatgtgtatatatatgtgtatgtttttgtgagtgtgtgtgtctgtgtgtgtatgtgtgaaagagagagagagggcatgtgtgctttgatacaaatgagtgacagacacttggtttaactgtgagtgttttgtggggagaagactgaggcttcccaacagattgtcagaggtctctgtttatagaattgtctttgttttggagcctttaatattttgttctcctaacaataagcgacagatctttgtttttatgagatctctctagttcttccaaaggtagtccatcactcaggggattgccgattggaacccaggagtaagtgtctggagttctggttaaatagttccagaactgctgaaagaggcaagattttgcagatcattctggtgaggtttgtgccaagcttcgcaaggctggttcaactcagtgtcagagctggagcaaagcccacgaggtctactcctgtgatctcaaagtatcatcccctgggaactggttaggcagagagcctggtggccctgcccggcccactgattcagcagacctgcaggcgatctgcggaccctaaagcagagacttctctttagctctctagcctctacgcagtgtccgcacctcttcctcacagccgccgatcttgtttacggctggggagggtcacctttcgtagcgttcattctataaagagaaatctgatccatatgggggtgtctttcaagtctctttaaggggtttcctgaaaatgaagaacaccaaacagtatgtatatactgtttttccctgtgcatgtgctatatattaagtttaatttataaaacaggcttggcaaaagatgaatagctgccagtgataaaatggagcatagcagcctaaatgtaaagtctgagttgcgtagagggagaatgtgagagaaagagctggagacaagggatcagttcctgtaacatgtgtggtcatgtgtgtatgcttatgtagcatatatgtagcatgtgtggtcaggcgtcagctttggcagctcagtggtaggggacaatgcccctccaactgagaaaacgcagtgtcaccgaggccagagggaagaacactgagatcgcaggaaactctgggaacttttggctggagcatctgcctcgcttagtaagtctgtgagctacggttccacagggtgacagccatctctaaaggctttcagtttgtaaagtgtgtgctggctaaaaaagcagggacaagctggaaagtccaggtaccttttggggggactgtgggtagaaagtacagcccatcttaaaagctgaatgatctcattggtcactggcgcatggactctggaaagggtaactccccccgccccccactgaagttgtcgccaggcgcctgcataatcacataatttgaggatgcagggcaaaatgaataaggggaggcttgtttaaattattgaaaaggccaaggccgttcaggcagagctctgcacagagggcaagcatgcatgtgaccactcagaaagccaccctgggcacgtgcctgcgatcacatcaggcatattaacaatttcagtcataaacaagagtgcagaggtggagaaagaatgagaaagatgtggctaagacctgacgggctgttcgaaaggttcatggagaagtttggaggacgttggggctgactagaaaatggtgaattatctggacatggtggctgaggcctgtagtccagcacttgggaagctgaggcaggaagagctgggctttgaagccaaccccaggctacaaatcacgagtctatctttaaaaaaaaagttgatttttttttccaaccaaaacttgatggttttaagtaacaagtgaggtagattagtgagtgtaaatgatccgagctgctgggtggtgatggtgcacgcctttaattccagcacttgggaggcagaggcaggcagatttctgagttccaggccagcctggtctacaaagtgagttccaggacagccagggatatacagagaaaccctgtctcgaaaaaaaaaaaaaaaaaatccaagcaagccacacgtgccttagttttagtaggaaggggataggaaatctctgtgtttaactccaaggccccagttgctctgatgtgctagttaggcttctttctctaaggacttggaaggaggaaggggtgggcttccctgctcagtcaggacgtgaagtttgggattgtgggggtgtggtgctctctgtgaagtaatgacttggattgggcaggatgttgagattactgtccttggcacttcgagatgaatggagtgtgtgtgtgtgtgtgtgtgtgtgtgttctctgcaaccaaacttaactgctgaacccaaaccctcaatatgaccaaatacaggcattaaacaaacaccacgctcgggtgctgaagagatgacccagcgcatttgctgtgcaaccataaagacatgagttcggttccctgtcctcacacgatgccaggttctgaagcacggtctgtaatcctagtgttcttagggcaaggtgggagtggagatgtcagaagcccccatggcagctggcccagtgtgtacatagagacagatgagaaggagttagtccagactgatgcccaaggatgtcctctgacctccacacctgtaccatagtatgcatgtgtacacacacacacacacacacacacacacacacgtactcacacagagataagcacacacacatcacacacatgtacacatgctagcacacatgggcacatacttgcacatacacgtgcacacatgtgagcatacacaagcatatatgtgagtacacacgaacgtgcacacacacatgagcacatgggagcacacttatgggcacatgcatacccacaacatatgcatgcactcacatatacacatatggtgccagtttataagagaagccccattaggggcccggcgctcactactggacactgtctcctacagacagcatttgtgcctagcttgtttttaccattcgtttatcaacagtaggaatctggctttgtcaaggacaccttgagagagttgctatggaaatgggcttttagcaaagccctcctcctgccttttgctcaccacccactcctgtttctaagatcaaacttcttttcatcgtcccacaggaaagagaaagcaagtccagcgtgctttgtgctgtgtgtgtgctgactcccaggatgctggccttggctttcccctcgctgtgtgaatcacttctctctctccttccctccatcctcttcctcctccccttcctcctccccttcctcctcttcttcctcttcttcctcctctctctcctcttcttcctcctcctccttcctctctctctctcctctctccctctcctctcttcttcctttctcacctctttttctccttctttcactatcttccatgtccctctttcttttttttcctcctttcttcccctccttttatctgttctccctcgcttttcatcctctgtctggctttgttctacactgcagtgggtcctagaacctcaaacctcttcttttactaaactcaccagtgattaaattgcttttcttccaaaaccaatcatttgcttttggagcaggagagttttagtagaggatctttctctttctaagtggctctgtccctagagctgatacaggtcacctttatttaaagaggaaaaaaaaaaaagcactcctaaatgtgggctgttcctttatctgagacataaaatcactaactagtaactttaggatacttgtccttgaaagtaaatggcctgatttccattagacaagcaatactgtcatgtttatttaggcctatgctttgatgttcagcgtttaaaccatgtgaaaatactggtctttgatatacaaagcaagatcatgtggtaacaatttaaataatttttactttataatgaacacagttatgaccacttaaccacaggtctgcactctgggaagggcaccacagggcagcttcctcctgaggcacagcaggcctggttgttgacacagtcaagagacagtaaacaagaggacgtgcgaggctgtggctgaggtaacagggtgcactgtcccacagtgtgccacatggttaagaagtagatggtatgcactctaaaataaaaggtaggaagaaatgtcgagggtggtactatgaagacacagactggcagcagtcattgtaactcttcaataattgcttgtacagtgtcaggatgctgtggcggcaaggcagtgttttcattgccagtcattttgttctgtcacagcaaacattagtctcagactcattccttggccactaatccgacagtttcattcttggccactttgatgttaaaaagtcactccacgtcagcagttctctaagacgcactctgcactggacccggggagtcagtaaagtgtttctggtgaaagcatgagggcccaggttcggatccccagttgccgcacaaaaggcaagatggggcttggcacacacctgtccttccactactgctgggccagggtggagacagacagggtcgccggtctcactaatcccgtgagttccaggctcagtggtcttaaaagtgaggaaggcaggccatatcaacctttgcttgcatgtgtagaccccctccacgtgcacacaaacacacaagcgcgttcacacacatgtacacacacacacacacacactcacacatactccaaaagagcttctgcttcatcactacttctaaccaggtgtatgtgtgtgtgaaggtgcttgtgtgcttgtgtgtgtaaattgaggactaagtaacagcacttatgtgacttcactcttactaatacgctgttgaaagcatacagggaatgttgacaatgtggcgtgtgagcaagtggctttgctctggtgtctgttacacaccagtgagctcctcttcacctcactgtgggcgtgtggcctgtggtcttgtcaggttttctttagcacttttatcttgatgctgaggctgcttggtccacatcactggcacagaggtttagcttttcaacacactttcatcacacacaggggcatctctactcttctcttgaggaacaataatcgacttagcatgacttctgaccagcttgtgattatcctggagtacaggcatgggatgtgtttctataaataacttcagtgtaaccctcaccctgtcatctctccttgagacccacctggcctgggacactgagcctgtgttagacattattaaaatatgtccaaatatcttttattgttaatgataaattctgttactttatacagtgctcactccttcattttcttataaattgttcaatattttgtacattagcaaagatgatagggatggggccaatcggatttcctgtcagcaattgaagtcgcacttgcggctgagctatcctgagcaaaatacctctggttccaacaggctgacagaaagaacagccaagtatgtcttagatagctatgcaaagggttgcagctgagtgtccaattcttgaaggcacagcgccggggctgtcagaaacaactgctcacaaacctggatgaaccacggtaccctggccagatgagaagcacgccccctagtggaaaaaaccatgagcctttatgactgcaattgatccaaaacaaatggctgtgttttgtgaaacacacaaatgagtccgccatggtatgaagaagataaggatggatgagtgggtggatggatggacaggtgggtaaaaagacagacagatagacaggaaatgctcaggtcaccttaaaaactacttgtcaagtcttcaaggcagtgtcttggaccccagtgtgagtggtgtagaagctgggagctttctttcttatctctgggttctgcagtgaatttgtagacatatcctgggtaatcgagagatgaagcaagaaagcacttcataaatgaagattaaaaatggtcttgaatacttaaaaaaaatcacaaactttaatttgggaacgtgaattattctctcagatttttctgagatttgaatcactgactttgacttttgtgaaagttgcctttgttttccaaaaggaagggcgggcactatgccagtctaaaccatttaattattcaactgtataaaacattcccaatcttttgttttattctaggaaaaggttatctgaacatattaacaggttcctctaaataggaattttaggtcctcttctttgtggatggtcacattaattttttattatatattagataagtacagtattgtgtggaactcaaaacctttttctccccaagatagaaatgcatacttgtacacacttgtgcacaatacaaatgtgcacatacttgcacacacacttgcacacatgtgcatgctggcgcacactttcacttcgagggccttaaggactgactctgaattgtttgagaagattccgtgaagaaggtgctgtgatgagctcagtcaatatttgaagatccattaagatgtgaaaacactgtacagggaagaactcagaagcttctattaataaattattaaactactagaaatgtctgggacaaagttatggtaattgcataatattactttttgtctataggttggtggcaattgcttttaacctaatcttagttaggggactttccactccagcagcccggccctgaagggacttctagggggccaggtgtgctcgggctgtgaagaaaggggccgaaacaggagcagccagcaagtggggacgcatgtgtttcatgctccgaagggtttggtataaccaagtttctcggtgctgatgaaatgcatagacatgtaacttgttctgcagtgtgtcctgaaggggaggaaaaagaggttactattgcagtagaaataactgaaggaaattactttcccaacagaaatgtagagtctagcttattaggcatatggtgcacttgacatctatcttgactgcttctatgcaaagccagccttgccttctcagtaggcctgagtggatttcctaccccttcctctagccatttgatgttcacaaggtcagttgccctgggttgaagtatttcttgaatacttgaacaccagacttgaagatgactcagtggctggagagaacttcaaacatacatataaacaaatatcaaattcctactcaaattgttttctccagtctctaatgctggctttctttaatctttaaagatgtgacaaaacgcaatatggaatgcgatttagtctataaggtggaattaaaacatgctatgtgaggagtagtttttagccactctcaggccctggatccgctgatttgagtgctcccatgatagtcaaactgctgggtaattctaattcatgtgtaaagactctctgagagacttaagttttgaaaatatatttttgttaattctttgaaaatgttgtgcgatgtattttgaacattctcagcacccttccacccctcccactccttcccacctaccttcaagagtgcttctttctctaccaagtctagtttgtgttgtccagctagtcttaagattaaagcctgctcaggggtgtggtcagcctatgagggggcatgtcattaaaaacaaacaaacaaacaaacaaacaaacagcagcagcaaataactgtctgtcttcttacagcaggcccagggtagactgatgtttgcaacccagcaactctgtcatgagaaccatttttgttttatgacttaaattcctaaatttttatgtgaaacaccataggaaatagtaggtagtactcaaagatcaaagaaattaaaggcaaggattccttctatagaattaatgcaattgaatgttattaaattgaacataaacattttagaaataatactgatcctgtgtgtgtgtgcgtgtgtgtgcatgtgtgcatgtgtgtgcctgtgcgtgtgcgtgcgcgtgcgtgtgcgtgtgcgtgtgtgtgtgtgtgtgtgtgtgtgtgtaggactgaggatgtgctaggcaaataaatgctcgaccactgagccccatccccagacctgactaagttatttacaaggagcacgtgacagtctgtgatccgggaagatgagaatctgtggagtcggaagctcggcagcaggctaagcgcctcgcaggactgtgtacacggtcccttcctgcaggtttcctcctccaccgcgtgcacactgtaatttctggatctttatagcctcttcgctgcggtcagcccctctatcaagataaagttaaatctcagaagaaccctcgtgggaaccctgccctcagaattgtgcaaacactgcttctgaatgcttggaacctgccacgcgtccagctgcttcgagataaaaatcatcaagaaaaaaaaacgggacaaaggcagagattatctgtgccgggggggggggggaactgtgaaatttggatctctgtgttctgaagttttcttcacacaagaaaacaggccatctttagggagaaaagaaaatcacacaaaattacagggaagacccctgcaagtcccgccagaggcagcaggcggctggctctttctttgaggcgggtgggcagatttctttggacagtgtgtgaatgtacaacttgcctttaaacacattgtttcaacattttaggaggacaatggcaatcagaagctagacggatatgttgagaacctggattctctagctgtggttagggacaatctctatagcaaccaggttgagctttgatgcatctcagaatgaactgaaggcgtaaggatatcccgcctctaaccactgatccaggttacccattaataattgtttttgttacttcagataaaatatacctgcggtaaaatgcccacatcttagtgtattcattctgtatattttcccataatcacatgtgcctaagaagtccagacattgagaaagatacagaacatatttattccagaaaattccttcttgtgttctgggtctttctcacagatgtgtcctgtctcagagtttcacatcagggagacttttgccgctcacgtgcccaatcttggtggaaggtcccttcattcagcctgtggatttccagtcttctttggatctgcctatgaggtgggctacacagcttgtcttgactgattttgcttttggactttggctttcaggcttgttccctgccattctcaacctggccaccaatgcccacatcagcgccaatgctacctgtggagagaaggggcctgagatgttctgcaaactcgtggagcacgtgccgggccggcctgttcgacacgcccaatgccgggtctgtgacggtaacagtacgaatcctagaggcaagtacagctttctattcatagagactcacctatgagacactttatacaacttctctttgcgggtgcttggatggaactcagggctttgcacatgcttagcatgagttctgtctttgagctccaaccccaggtccacccataggaattcatacttttggaagcaactgaagactttggctgaaaaatcttccaacacagctcaccacggctgatcttcctctgcactgggtgggtttggcagtgtaagaatgaaaatccaaagttgagagctacctttttgttttcttttaacagagcgccatccgatatcacacgcaatcgatggcaccaacaactggtggcagagccccagtattcagaatgggagagagtatcactgggtcactgtcaccctggacttacggcaggtaggttgggccaggcccgctggagatggtccaaagcactctgatgtatgccttgttttggtttgtttgttgtttgtttgtttgtttgtttttgaacacatttgtccaggtgttgggtaggtgatacatagtattatgtggtagcacttcttcacctatacggtcctggtccaagcctagagtatgagggtatatctggtcgggcctatggtatgtgtgtgtatgggactatgggtaggggagggacagggacaggtcctgacagaaacctaggggttgtttgttgtgtaggcagctgcaacctgactagactggagctctgacgtaggagctagactagatctgaccagttggggagggacaggcggactcaccagcttgaccctacagaagagcatgcaggaggaccaggctgggcagagaggttgggtatgaagtctggatgtactttcttaggactttgcacgagtaactcctgctcgtttctttctctgaatagcaatatttaagaagccctggtttgggttcgaccatttgtaaaaccagtgagatttgacatatgtgctagccttgcttttaaggaaaatacaagtgtcttggtctagggtgccatagtgagggcagagctgaagtttgcctggtagtgtgcatgtgaattcttcttgcctttagggtgtgtaggcaccacccttgaggaagtgatgccaccctcagtgagtattttgggtactcttaaatcaaaaaataaatcactctaagagagaatgcatattttatgaatcttgactattatggttatcaggattattttaggtcctgctcactgggttggaagtgtgtttcccatgctaatatttctcagcagaacagaaggatttctgatttgagaaatactgtattaaagatcaatatgcatcagagaaatgaaaaccaaaagcacaagaagctaccatctcacacccattaggataactcttctaaaagaaatggaaagtccccaagtgtggcagggagttgaggaagagagagatccttacacttctggttggtgtgtcaatgatgcaggaccagggaaaacccagcggtgggtggtgggtccttaaatatttaaaatgcacagtccgaatatgctcagctcttcccccactccaggtctataatccaaagaacagaaagcaaaccatcacggttacagcagcattggtctcagaagccaaagggtggtgaccactcagatagatgtccatcatcaggcgattggtttaacggatggcagcacgggcacgtggtgcatgcaaacacacacacacacacacacacacacacacacacacacacacacaccattcggcccttgaaagcagatgaaattttaacacttgaagtcgtgtgaagtggcataagacacatgcagaagacgaaatattgtataatttgcggttgcaggtgctgaaagaaaaaaaaatgggagttagtttctgaagggagtgtcagatgatagtaagaaggtcgtttgggtgcatgatggtgatagtgaaaaaaaaaaaaaaccatgaattaatctggtggaatcatttgattcaattggctgaaatggcggtttgaacgttacctatagtttatcacagttaaacattcttccacactgtgaaaggcatggtgtactgtatcagccaggcagcaggaagcacatgagctgggcatggagagagaggcatattcaatgccagaaattggttcaatggtattggagaactgaagggggtggggtggggcagaaagtctcttgagctgtgatggagctggagggaccaggggaggattggaactgttggcatctggttgagggagaacctccccacaccgactccgtggcacagtaggaggctcccctgggaaatcctggagagttgcaactggagtcaactattgtagctctgtcagtggtttatctgttggactgagaccaagaggaaaagccaggtgacaggcgccatctggtagcctccctctgcagggtccccagcctcttgaaggagatgcctggtgttgttcagagatccagtctcagccccaggagtcagaatccaggggagactctcagttgttagcagctagacccacctaccccagcaggtgaccacttgctgtgtccctgcattgatgcaagcgcagagaagcagctgtggcttccttggaacagcatcttgtcatggtggtcagccagattgcaaacccattgaaaggaaaatggaaactttggagtcttcctggccaaatcatgggctaacttctactacacctaggactaggtgcccttggatctcagctgggagaacttgtcaggcaggaggactgaggaatcccagaaataatttcgtttaatacgggtatattatattaccttgatgttgattggttttggtgtggcatagtggagatgcagagagtgaccccaaggcagttttttttctttttttacagagtgtgatagcattagaagcaatagtgtgcccaactaactcctcactgctataaacctcaatttgtttctttatctgccccttctctttgtgtgtactttgtgcatgagtgtgtgtactgtgtgtatgtacatgtgtgtgcacatgcatgtgcacatgtgtgtgagtccatctggttcacaggcaagtgtgtgcacaagcatgtggacactagaggctgatgccaagtgtcctctttaaatgctctctgccttgccttgttgagtcgtcactcccagaacccggtgttctctaattggctcagctagctggccagtgagctataggatcgacctgtctctgcccccttccagtagattatatttctgcaccaacatgcctggctcatttccgtgtgtgctggggactcagctcctcaagcttgtgtggcaggcactgtatagaccaagccatctaaccatagaccaagccatctaaccatagaccaagccatctaaccatagaccaaaccatctaaccatagaccaagccatctaaccatagaccaagccatctaaccatagaccaagccatctaaccatagaccaagccatctaaccatagaccaagccatctaaccaccccatcaccttcctttctctgatcttcagacaccagcaggggaaatgttaaacaagaccttaaaataacctaattagacttactaagaggatactaaaagctaaaaagaacaaaacaaaaatggaaaaagaatcatgcaaatttttagaaaaacaaacttcataagtcagtgataacttttcagttttggagaataaaatgggttcgttgtaaacagacaattccggttagcgtgaggaggcagagacgctcgccatctcttcacttttttgataacaccataaaacggtcccagcttaactttcccctttcccctttccccttccccttccccttccccttccccttccccttccccttccccttccccttccccttccccttccccttccccttccccttccccttccccttccccttcccctttcttctcttctcttctcttctcttctcttctcttctcttctcttctcttctcttctcttctcttctcttctcttctcttcttttctttttgctctatgcatttaataaccccccccacacacacagtgttcacacttctggcactttctacctcaggtgtgtgctgtgcacacctctgctcggggttgtgtctctgaactctcataatcacactccaaaccccgagtcagtcagggtcagtcactgaggcctgtgacagaagactaaactgaacttagagcctgagggcaagagtttgtgcagctccctccaggacaggactcctgcaactccagtggctggaggctgtcattgcatggcaccctcagaccccacctttctccagcagagattccgggatgtagaaaattgtatcttgttcttgacttgaacaatataactgcaactcactattacagcttttaaaagctttgctgtggtcttccattacagttgcccctcctgagcataagagttcctgggcatggttgggttgttttgttatggataacaatgggggagctctcagttaaacctaccgacctcattccctgacaaagagagaatgaaccgaatagaaaccatctcttgaagcttaaattccaagtttcccgtttagttttgagggtcgctttaaaaggagtatttttttattggccaatggacagaaatgtacgggtgtctgctggaggctgcttcgagatttcttcctcagtgttgtcctgtcgtacgatgtcaatgtccaactgtcctgcgatgaagatgtgctctcctttatataaaggaaagtgtcacaggatagagcagccgagtcactagcttgtcctcaggatcagtagctccacatggagaagttaggttcaattcccaaatctgagttccttctacactgctggtctccctcacctgatctccaagcactgctggccttcaagctatgacacggggtggccgtcaagggtccttactttttttttttttcctaactttggcgagctgagctgagattctggcccctctctgcttctgctgctgccctgccatgagtccactgggatcctccaccctgcaggtctgagataccagcgcttctgtgtttcggcagtggctgatagacttgggtgctcttcacctcatagtgttgagaatacaaattgaattggtgcttttgtgtttccttcaaaagaatttttaaagcctgctcaaatattttcaccaggagggtcggatctatgagtacaaaaaagaaaaaaaaaatccttttaaagataaaatctgtttggagagaaaggaaacgttccctgcggcaccaagcgaggagctaggagcgcctactttttgtgtaggtttaattaggaagtgccacttagttgtgggaacaggatcacagaagaacctttgttgtgtgcaagcccttagactagagtcgctggcttgggggagttgtaaagtctcattagtttggatgtccattgtgtttcgttccctcaaatctcagataaattgatgacaattaggtggtttttactgctggtacacacacataccacaaacacacatacatatgccacacatacatacacactcacacacaccacacatacatattccacaccatatacacatacatacatacacactctcacacacaccacacacacatacacacatatatacatcataccatacacacatacaccacacaatcacgtacacaacaccacagacactatacacacatacatactaatatacatacatacactcacacaccacacacaaacacatataccacaccacgcacacacatacataccacacaatatacacacacacatacaccacacaacacatacacacaccacacacactcacatacaccacacacatatacaccacatacatacacatacaccacacacacacatacataccacacaccacacacacatacactacaccacacacagcacataccacaccacacacagtcacacaccacacacaccacatgcacacacacacaccacacatgcacacacaccacacatgcacacacacacacacacacacacacacacacacactttactaagtaccctgagaaggtccataagaaaacaaactgcattcttcagacaccctgaaagatatgtagatcttacctctaaattgggcctttataacaaatgggtcttggctttgggcattaaaaagagatttctgcagggaggtggaaggcttatccttcgaatgctgcgtcacagaagcctctgttaccactcgctgccataggacagggtgatgctctgtgcatgttcatcctgacctgtccagttttagatataacgttgtctgtctgacatctgtttgatggcttagaagtagccctctctgctcccgctgctccctggggatatctcttctgctctattctctcccaatacccacacagctcaatgttagttagccatgtctaccctcttgttttattccccacacatggcgactcttccagttacccaaccatgtgtaagaaatcgaccttggtagctgtggtgtgcccgtcagggacgatcagcctattgtttgggggagtttggcaaacactcctgttctctcttttgggttctgagcagcagagccttggacatttcatctgtttcaacgtcagcttttctggctgggacctgagtgggattctgggggaagtgaatgaggatggtttggcaagagtcttttgcaatatgcttttcccattcccaactgtttgccattgaaataaagcgccctgtgcatttgtggacagaaatggaactccgccaaagggagggaaaaaaatccttatttatttattttttcggttatactagggataaacaaagattgtgatttctgacaaaatttttgagacaagctttgcagtttggaattcattccagctttccctcctaaccccctttggttcaaggggtctcactgtgtagccctgagttgaggtggatcatgctgtctagagcaggctggcctagcgcttacagagcctgcctctgcctccctggtgctggggatgtcgactatgcattagtaacctttttgcttgcagtgggtcattacacagaaacgcctcactctgatatagaagtaaaagccatggtagtgacaggagcgttaaacaaattataagacaaacatttgggagagagggctcagcagttgttccccaccccccaaccccatataaatcccagttaggcgtggcaacctgcctgcaactccaaccagggaacacagagacaagtgattcccagagcaagctgtttagcaggaataagtccatcagtgggctctgggcttgactgagagactatgctctcagtcagtgattgagggaggacgatagcaaccctgggcctcgcattcataggcacacacgtgagcacttacccatacattacacaaaaatacacgaacacaggcacgtacagcccacaaacacaaaggaggcggggaaggattctttttcctaatcactgatggttttaacagcgagagctccttccgagccactcttcatatttgtgcctactgtgcacattcagtgtgtcacagagttgctgttccacaggttctacagtctcaggatatggtgacacacaagacaattactgtatccatacaaaaccctcggcagaggaaaaagtaggtttctcagatatactaacctatatagcaatgtctcctttgccatcgatgtggaggagagctggtccctccgggggtttgtcctctggtgttgtaggaggcgggtagcagttagcttctgctctgtggtgttgcagatacaaacagaacatacaggaaggggcttatggggatctcacagaaggactcactgtaggaaggaaggaaggaaggaaggaaggaagggagggagggagggagggagggagggagggagggaggatggaaggaaggaaagaaggaaggaaggaaggaaggaaggaggaaatgaggaaggccttgcaggggacaaggcagaagctcagaaaaggattgcagtagcgaaagtgcagcatgtgtgagctgagatagcacatccgatcctagcagtttctcttattttcctgcccaggcagccaagcatctgacccctattctccaagggatattgacttcatcaccaaactatctcccaagtatcaggataccgatcccaagccccagtcccttatagggtgtatcacataggtattaatgacatcctcgtgtagacttgagagcgttactagctcccatgggatacctcaccagtgcgaatgctgtgcagccactaaaccatattgctagagataaggaaatgtccgcacatgttcagatgccgccatcaaagcctgaccagagaacagcaagacatgtatgatatccagtggtgtgtgcaggagccagtgcagctctgtggcaccgcagggatcctagcagttggcatctgtcatcagcatgatgaccagagtctttaaacagcagagtgctgtgcccagatgtggagggcttgctatcagctgcaaacagtgaatcccacagaccccgagtatgtagttggatggcctttgacagacaaagaggcacgatgaagccgtgtacttatcaacggtgactatcctcgtcatgtcatcccagagcactgctgccccttcccaggctgttacctattggcctcatcctcttccttcaccagcctctctgcttcccccaccccaccccccatcccccacccccgccttccatgaggtcacatgatgatatataacttcctagcaatggggtcacaacccgcatctggcttctttcctctgggcatcctgtgctggtttgctcctttcttctgagcatcgttatgagcgcaccgacctttgtttattctttcctggtcagaggtgtttccagcttctgtccattgtgtaaaagcgtctgtgggtgttcttataaaagtcttttcctgggtttatgttttctgcttttttcgaggagtaggattaaaaagataggaatatgtttctctgcaagacaaatgagtaaaccttagctcataaggtggctgcagcagagattgcggaattgtagctcttcttctcgaggtctgggtgtcttacagctcagaacttaaatactgcctctcatatacaaggcctttgttggttgtgccaggattcggcagttattgctttatctttatgaccataagctaaattcctgtaacagtgtttaaagactaagcaatactttattatataggttcataatgctttatttaatgtgttttcagtttggggccactataagtcatacatgaatatttttgtggctgcggtgttgatagctctcttgtagagtcttcagtaccaaggattggagctcagagactttcgtctgctacaccactaagctaccttccagccttcaaatgcagtcttcattagtttggattttgtttttcttccaaaaaaattttttgttcattttacgtgtccgcggtgactgacagtgttcctcacaactccttagcatcatgattaaaaggcccttgctccccctccctcttccccgctccttccctcctcccttgttctttcttttctgaatattagagaattaagtaatcaataactctgccttatcttatgtcattatattggatatatatctaggcacactgggttgaatacaatgcatcatgccacaattccctacactattctgtgcagtgacacgacagatgagaagcctaggagcaattggctgaaccctggggctgagtgtgtagcaggcagcacagcgcagggctgtgctaacccaccctggtgttcacagagatgaccgtgcgattcacttcacagaaagcatcctcatcgtgcttgactgtactcagagaatggggcctcagtgtagcctgctcctcagccttgcgcaggtatgaatgaagcctgggaaaccctgagatcagggtttagagctgcaaatgattagctgtacaaaccgagatgtcctgggaacgccggggaggccgtgagatcattttccagcttcagccactgaccgtggtggccttagcttcttagggttcataattaccagagcatgtttataatagtttctcttgctttatttatttttaattaatagactcttgggtttcatatttatataaagattggacagacctataaagcatttccatagagccctcagtaccgtgggttgggtcaaatttgggcttttcataattgttcttttaaatgtattttcaatcgtcctaatgtttcttccctacagtgttgaggtaatcaaaattgcctgtctttagatttaactgtctctgtcttcttcactcttccttactctgggggtcaaagctagacacctttgttcctcctctgagggtgtgcatagaagcagggtcagtgaccatccaccatcaagtagggctccactgagacccaggctctcggggtcaccacaactcacttctagccttccgttggggtcccatgctggttatctgttgttcaggatacaacctctgggagcaggtgttctcctcacccatggggctttgtgcagaccatctgtggggctctgggaagccctaacagctctgggctgagttttctgttggaaaagtggcttcacttgccagatcttagccagaacctaattcaacagtgtctccagaaggaaaatacttccgacaccctctgcgttgttctcctgacttccagctcgatggcttgttgacttctctagactgccctgcccagaaacaccgctccccagaaacactgcgccctgctcagtccaatgcatggtctccatcttccgtggaaggctgcgtctttacactcagtttcatctcttcatattttcgttattttttttaaagtttgcttgttcttgtaaaatatacagaatataaagtttaccactttaaagtgtatgagttcatcatgcagccatccccaaccccaagcccaaatcctctttatcttcttgacttatcaaacactaactacttctctctcccagttttggccatgataacagccactttctcttttttctttcaaaatctattttatcttgatgtatgcacacatgcgtgtaaagtggacatgtatatgcctgttggtctggatgcccatggagaccagaaccatgagatttccctggagctgtagtcattggtgattgccagccatgtgccatgaatcttgggaacaccgttcatgtcccccacaagagcatgacctaaccatctctccaacactggtgacagttctttctatgagtctgatgactccaggcatcttataaatagggcaatgctatttttataatcctgtgtctggggtatttcccttaatgtaaagacctccaggattgcctgtgttgcagatggtatcaaaatgtattccttttgaagaccagataactttcatttgtagctatttccaaaatgttgtctgatcagtcatccatggatggacatttgggttgtttccagcttttggctattctgaataatgttgctataaacattggtgaataaataactttttgaatgcatccattctctcccaggcacgtaccatattggaattgttggaccatatggtaattctgtcatgggattgttttttttttttttttttttttttaaaggaacactacactattgttcacagtagctcacggctttatatttctcccattcttttttaaataaccaaaagtatttcatacatcttgagcgctcttcatatgtatacgttatttttgatgagctttaaatgtactgatttttcacatcagtgtctggccatgtggagatgctctgtgaagtaagatgtctcaagaacaaaaggagaatcttcacacaggattcaggggaagaattcacgtccagagtgagatctcactcgcacataaaggagctctctgatcactccagtgcaaacctgttaatgattcagtcagtgaccaaaggaaagaaaacatagcgctccccttcttaggagtggtaaatgtgtaactcccagggcagtgcttgtggagtcgttcagtagggattttcccagctcctgtagacggtgcccccactgggcttctgaggtttaatgggggaccatttgctttggctgttttcatgaccatgtgttgggagagaggtgtggaggaggagagaggccctaaccctttcattgtcactatgtctgccgaggccagcactaagtcaacgtgcagactagggataccatgcaaaggatttgagttttcagcctggattccctgcactgagacaggaggcagagcagaagcaagagtcctcctcatgtagaccggtagtctggagttggaaagctctccgttgccctctggttctttgctattcatgtttagagttttcgggaagctgttgctggtgtctctgctctgctcttttgaccttctcaaagtcgctatcaccctctctcacaaatcccaagcatcagagttcagtcccacgatccttcattgctgctggccctgtcctgttccactttaggattctcagtggtctaagaaaatggccatggcagtcgtggcgcacgcctttaatcccagcgcttgggaggcagaggcaggcggatttctgagtttgaggccagtcaggtctaggacagccagggctacacagagaaaccctatctccaaaaaccaaaaaaaggagaaaaggaaaaggaaaaggaaaaggaaaaggaaaaggaaaaggaaaaggaaaaggaaaaggaaaagggaagggaaggaaaggaaaggaaaggaaaggaaaggaaaggaaaggagaggagaggaaagaagagaaaagaaaagaaaatggccacaggttgcaagacctataaggtaccatcaccttctggtctctctctggctctctagacttgggctgcctagactgcttgcagtgtctgtattccatgctgtggccctgtgtgctgtctactctttgcctctttggcctgttctctagacacttgtcttctcttttctaactcacgtttggatggaacttctcagaccaccacacctctccaaactagatagaactctcctgctgcacccaaatacccttctggcctctctttctccctgcgatgcaggcagcctcgtctacagacagccgacactcattgatgctgcatttacagtatcaaccacactccctctaacgcagcagatacttaatctctgaccgtcaaaggacacttaaacgtgaagctgtccggtgtctcctcttctcagtttcatgtgtcgttgtaggatatttcactgcctacctctccctcttacctgtttgtgctctagggaagacagtactcactgccctggagctccaagtgccctattgaaaggtacaggctcttctcagaacattcagccccaatcacaggtcagagctgtagaggcacccgtgtcccctcaactgtgaggtaggaggggatgacacttcctggataacattcagctgacccacaggctctaattttgcttccctcgccccgaaacactgaagcagacagtatatattgcctcctgttttgataagaacaaaatgggagcttccttatcaaggaaaagcctagcgtactctcgaaggtaaagactagcgtaagtggaacggggcagatctggctgggggtaggactggtacttctgtaccaacgggtctggactggcctgtcactgcatgccataaccaggtacagctcgccctgagggtccctcggctctcttcccgagtgttcaaagagaggaggaagggaaagagtcccacaaagaacatttggtgacaggaaggttccagaacacacaggctaggaatggagagcactcttctttccggttttatcttgttagagaaagtggttcaacatttttgttttgaaataacaaacactgctagtcaccctccagttgggggttggagagtgactctgggaggacgggggagcttcctgctgggctctttgaaacagcctttccagctgacagaaagcaggtcttcctccaacagacatgacagacatctttaaaattccttccccgtcttctgattactgattaaaagcttgactctttattcttcgttgagccctctttactgtctctgagccctcttactggctccagtcttgggcatttatatatctcagcatggatcaaaaatgtatgcttcctggtattctgatatgttctttaaagtattagagtcagaaacctgtgtggtctgagtttatcaccacaagcaaccagcccccttccctctggaaaggcagacagaaaaaaaaaaaaagagtggggagaagccattagactttgacctgctcatctcacgtgttaatatcagtgctgaagtgaaagaaaagcaaatccaaacttctttcctagtttctgcagatatccttaactgtgtgggctggacttcagtggacacacagccaacctccttcatagtagttactcctgggggatttctctagcagcagcgtggcaagcatgcctccccaggaccttaccacgtcctggcttgtggtttcttaaagctttgccaggacatggagtgatggacgagacttctctcagacagttgcttcttcattcttgagtaagatgtaagtttcatcatctgatagtttcagaaacaacaaagcttgctaagtacaaacgtgccccttcctcggggatcatcaagtgatacgatttatgaaacgcactattaactattaacctagatgccttttgtctgtgacaggtttgacttttctttttctttctttttcttttccaatttttttattagatattttcttcatttacatttcaaatgctattccaaaagtcccctataccctcccgacaagtgtgtttaccctgagaatgtcagaaataaatgttccctgttcagtcactgacagaagggtgggtaggtccttccatggggaattcccagaggcttacatgtgtcatcagcccttgtggattccgagagagcccagagaacatcggtggggatgaacatcagaccttggaaacgaggttatccatgctctcagatgtccgagtttcagacaggttggctctgtttaagttaagattgagacccacggcaggactcctgtcccagtgctgtggcaaggcagcgtctgatgtgtgcctacgatattatgtgacattgcatatgtgcattccggcgatcattaacgagtggaaagctgtcatgaagtggacttgaaaatggctggatcagctgctgttctagcaggaccgggatgactcagagtctgacgaaaatgcctccatcaacagtttgtgtgcagccaggcttgtgctgagagaagacagtttagtctcaagcaattttttttaaatgggcagcggaagtctcatgaattttgtttggatgaaggcttaagaatttataagtcaatagaatctctgtttcttcattctaagacctgctcatcaactagaattggtgagtgagggctttgtcagtcagccggggctgctggaacagataccacaggctgggcaacttagaggaacggattcctcactggtctgcggtctaggtcgacgtgtctttggcttgcaggtgcctgtcttcacatggtcttcccctaggtgtgtctgttctaagttcttcatttgtcatgtatacacatgatgtatgtacaggtacatgtgtgtgaatgtacagggtcagaaccttacttgctatttatccagctcagtcatctatgagtatttcaatttgttttgtgcgtgtgagtacatgcacacatctgtacacaatgaggtgaccaaagggtgaccttagatgtctgtcattccctcaggagccaccactttagtttttttcatatgagatctttcattttcctgggctcatagactaggctgggttggctggccaacaagccacaggtttttacgcacctccaacctctccagagcccaaatgacaaggacatgccttggtgcacagcttttaaaatgtgagacctaagaatcagactcagttgctcatacttccaaggccacttgcactctgctgacgggccagtcgtcttagcccacctcactagtctggaattcagtaaactggctaagttagttgctagctagctgccttggagcctggagatctgcctgtctctacatcggcctccccggagtgaggctgtgactacagttcatacctcccagctcatgaactgctgttaatctaagttctggagattgaactccagccattgtgcttgcatggcaagcaccttatggagctatctcctgagtctctcggttcttctcacaggacacggggtcacactgagtcagtcacctcttacttcaaaggccttatctccaaacacactggaatccagaagtaaggggtgagggctgaagactttaacacaggaaatctggggagtgtgtaggtcagctccagccagcttcagtggagaaagtttatacttaggctctttgcagcatccctttcctccttatctgacttagagcagggtccagtttttgtttcttttctggcccacattctggagagcatgagaactatcgaggcaacaatggccaataaacgaaagctgtgtttagcatctacgtagcgtccttttcctttttatcggaattacagcccccattccttgtttcagttcgcttcccggtctctggtttggggaccttgaggacgattgggagattgggagaacatcggcctgcttcccaatagaagggttcttattcatctgcgagtgagcagggcctgcctgcaggcctagtctttccctcctcagtcgtccttatctttggccttgaatcccacacacagctcagctgtctgtataaacgctggccaaggccttggtaaggcatgaaaatttggtattgttgtaaatgctgctagctggtgggaagaatgggaaagactggggtagaacttggtgcttgtgagatttcccaagaaggttgcaaatcctttctgtgcgctcatttgctcgctgaagtacaggaaacagccgttcttagcatccttggaatgcaactgtgagcttctacatgctcattctactaactcggtgtccttgtaattaacttgatcgctcaagttaacattgattagttgcttttgcctgtccccacccccaaatcctttcccctgctgatctcacgctgccatgatgcagatggacccagagcaatggctgctctgcatcttgagatacgaagctggtttctgtgcaaatgcaaaggttccttgttgctgttgctcttgctgctgcttttaccgcagaaggagaactcaccacttaggggtcggggcttgctccctgaaggctgtgtgagccctaggtgaggacttagtgagaagggtgcttggattcatgctgcaacgtgcaatgatagtttccaaatatgtaaaccaatcctaggatcgttcaggattacatgaggtgatcgtggagcgttctcaacaggcttgtggtgacctggtcggtcaccttattttcagtgtgaaactgggaaagggcaaattcatttcattttgatgtcattgtcactgtctgatcatcattgttacctggtacctctatttgcaaagtctgagtacgcaagtgcacatgagaagttgtcattggcccacacgttcattcccgtggtgaataagaatccaagaatagctacacagtgctcagtgatgcgcaaacaggggaacgtgctcctccatcttcatgtatcaacccagcttgcttctgatgttcttgagctgctgtgactgccttaccttagagggggacacaccacaggagcacagagtgccagtgtcaggtatccgtggcatccacaggctaacctctgccagggaacactgtgtgtgggtgaacagttgtcggtaataaggagacagtgctatcattccccaggttccttaaaaacagtaaggtacacagcggttacgggatgggctcttgtgcctagaagttagtgagcggtaggtaggaaaagctaaaacaaacagaaaccaggaacttcagagatggtaactgtatgccctgtgtgtacacaggcatgcacaaacatatgcttggatagctgcaaacacacaaaggtttttatgtacacgtttacatgtatgtattatgtatgtagtagtctgatatcctaagaacattactccaaagcctcaaacaagacccaggtccacagatgttgtttcaccagttactgttgctatgacaaagtgcctgatggaaacaagttctggctcccaggtatacacacacacacacacacacacacacacacatgcacaaacatgagtgcacaagtgtatacactcatgtacatacacacatacacacatgcacatatacacgtgcacaaacatggacacatgcatacatatctacatgcacacatgtgcacaaacatgagtgcacaagtgtacacactcatgtgcataaacacatacacacatgcacatatacatgtgcacaaacatggacacatgcatgcatatctacatgcacacatgtgcacaaacatgagtgcataagtgcacacactcctgtgcgcacacacacatactcacaggcacaagcttctttgcacacacacatacacacactcatgtgcacacatatatacacacatgcatacatgcatgtgcacaaacatgggcacatgcatgcatatatacaggcacacacgtgcacaaacacgagtacacacgttcatgcacacacatggacatgtgtgtatgcacgtacagacacacaaagatttgggtctctagaagtgaagttagagaatcacataacagtgcaatctagcgtcttctcattaactctagcacagaattcgtggcagattttgaatcaccaggaaaacaggcattttcggaatgtgtctggaaatgctctgggtggtgctgggctgtgggagagatgctgcctccttagtgctggtctggggctggaggtcaaaagtcctgtttaaagctgagcttcgtttaactctttccttcacacttcactctctgtcctcctgtcttcgtcttccccagctgacatcatttttgtttaattaataacttttgtagtttacagctcacagtgatgtgagtggagacttcctgttcttcatcctatcagagttcctcctcttgtcaacatcttgagtcagtgtggggcattggtacaatcctgtgttcatccactcgtgttttattaaccaagcctatagttgtgcatgttctgcatattttaatcactgtatgatgacttatgtccaccattatggccactataaggtcatttcatctcccatgcttccttatgtttacccctcccccaagtcccttacagcttctggttgttttgtttttttaatactttttttagttttaccttttccagaaagccattgagtgagaaccccgtagcatgctgcctcatcagcgtgccctctttcagttagcaggtgtgcgtgcaagtccccttcctgtctttttgcagctgtataattcttttcttgtcttaccactgattggcatgtttgtgcgtcatttcacttatgggaagcactttttattgcttccaagttaagatggttataaacaaagttgttgcaatcatctctgtgcagattttcatccagttcctaatatctaaacagtgtggtcattggttcatacagagagtatttacagttgtgtgtgaaactgtggtgctggcttctcatgtgttcttgctgctcccaatctttgccagcctttagtattgtctggtttggattttcgccattctagtaagctgtgaggagctctcctcaatgttatctcagatttgctgtgtgaaaaatatttaacatctccattaaggcaaagtaacactgcaatagtcagctccaaacagaggaagacattggaaacagtggagccatcccacagcaatgctaacggtgttagagagaagaattaagtatgggctttgtcgcggtttattttgaaaacagtcccaccgggagcataggtccctggttgtcaggtgtgaacagtcgtactcaaaagcatagaaaggccctggcaatcgtcactctgggcttcgagtatttgcttctgactctgttttaaaattgcatatatttaatgtgtagagcatgggatttgttgtacatgtgcaccatgatgcaaccattgtgtatctgtaagtccagagtttgctgtctttgtgtgtgtggtcagagcacggaaggttttctgtttagtaaatttagggtacaggactgttaccatggaaacgctgttatacactggaccagcaccttgtccagcctgtgcatctgaagttttatacccaacgttcatcccccatcctctctccaggccatgggaaccggagttctacactccatgtctatgaatcgggatcttttacgcacaagcgacttcttgcagcatctgtcgtttggggtttgacttattaattctggattgagacctcctcggtttcaggtctttcaagttgcatacatcatcattaaagctgccaatgcccctcggcctggaaactggattttggagcgctccgtggatggcgtcaagttcaaaccctggcagtactatgccgtcagcgatacagagtgtttgacccgctacaaaataactccacggcggggacctcccacttacagagcagacaacgaagtcatctgcacctcgtattattcaaagctggtgccacttgaacatggagaggtacggtctgcatcgcagaaatggctttctgtcatctgaccccccacccacccaactcaaatgtcgccatgatatctctcataggaatctatgctgaacattcaaaaccaatgagccttaaccagaggtgtgcatgggctgcctcactgtttaaagtagccttgacaggtctcagtcttgatttcttctcagcccacggttttctcaatcttcactctgctgtcctctacccctttagaatctttctataagaccagggcaagagcatgtgtttattggagagaagtcaggcatggtgacacattaagtgtcattctagcactccggaggctgaggcaggaggatcatgagttggagggatacatagctttgttctttactcaaacagggacagaggaggattagagggcaaaggtgcttctgaaaggtgtcgtccctcctccttctccctcctgttcagagatgtggagctgggtggagctgcccagggactgtgctcaatgtattcacctcaggaacctctgaggaaacagaaacagtgcggtcatccagcgccttgcttgatgggtgacccctgtgaaaactctcaggtgctctccatgatgggagctgggcaggaagatcttcagttacagaggttaactaagacagcagacatccttaagtttggggtgtgttttccttaccctccctagcctgtccatggcattgggcatttgcttcttagaagctatcgcatactagacccccacaacacgaggagactcatgctactggaagagttccagaaatctctgatgtagaaggatgggtaacccccaaaccgaggcaaagctagggctactgtttatgagtacctaacatgtgttagatgaggtttttgtttgcttgcttttagattgatctttgtaatgattctgtcacaggactttattgtacatgtgtacatgttaacttgtccatacaactgacatgtatgtttgcctgtatccagattcacacatcactcatcaatggcagacccagcgctgacgacccctcaccccagttgctggaattcacctcagcacggtacattcgccttcgtctgcagcgcatcagaacactcaacgcagacctcatgacccttagccatcgggacctcagagaccttgaccccattgtcacaagacgtgtgagtatggatggggtccctggccactgtgacaaccttggtttcagggcacattcttttcttcattttctttggttggcttcttgtcttcccagctatccatattttactgatgagtatctcctgtcatttgttataaagctagtttggaggtgatggccccagcacgcactcctcaggcctcctggctccctcctagttgtctccatcgtgtagtcacctggagaatgtaatggcctttgtcctaaatatcctagcctggctccacatctgaacttcagcaactcaggcattttaatttgtttgtttgtttgtttgtttgttttgaaatgataaaatttgagaaatatgtaagaaagtgtttacatgttaagtgtcaagttaagtataaaatggacaaacactgtatgccactcccatcacttcagagcgagttaccaggttgtgggtagctgggtgtgtaaatctgctaaactttttcgaagcagatgccatattttagccagaccagcaatgtggggtccctgagcctatcacatacacttacaaacatctggtggtgtcaggcaggcactgtgggctgctgggcgccatgccatggcttaccctgtctcatcctgggtcaccctggtggtgttcatttgtatatctctggccatccaggttgagcctctcagaactcacaataggtttttttcttttttctttttttggtccatttttgtgtattttgtattgaaatcaggttagagaaatcctctcagtgaggttttatgttcacgttgaagccatgaagaactctattctgatgaacagagtttccgttttgggtgaaatccatgttaccttcttttgtcattggtactgctgtattattgacactcactgtggcctctcaaaaatgacttgcgttttgctaggtttccaacgatgttatcttaacttctcttctagcagcgttgtggtcctacctcctgctctggccatccacattaacctttgtgtttggtatgagggtctcctttctatacacatgtgatgctgtagagccaagtgtcagaagtggttgactttcttccacaatgcgtccctatgttctgatgctgctgttgggcactgctgggctttactctcccgagtctctttctggaggaactgtcctgttgctgcattgatctaaccccatcccacggatgcattggtctaactttagacaataacaagcatttgatttctgcagctttatgttaaatatcatggtcgggtactatgttggtccagattggcttttgtagattactggcattgtattttaaatctttatttttgtgtacttttgtgtttctatgtaaacttattctacatgtatctaagcccccagagactagctgaggtttcaggaaattatgggttgccagcatgggcactgggagctgaactctggtccactggaagaaaaggaagtactcttaagcccgtctctagtaccctttatattttctttattagaaaatattagaattagttaatttctacccaaaaataaaaacacttgctaagattttcactaggattccattcttgggctggcgcaatggctcagcaggtaagagcactgacttctcttccaaagatcctgagttcaaatcccagcaaccatatggtggctcacaaacacccatcatgaaatctgacacccacttctggtgcatctgaagacagctacagtgtacagtgtattattatatataataataaataaatctttgggcaggagcgagcaaggactgagcgagcaggctgaccagaacgaacagaggtcctaaaatctcgattcccaactaccacatgaaggcttaccagcatctgtatagctatagtatactcacaaacataacataaataaataaatctataaaaataaattataagaatattccattctttagatcagtacaggaagaaatttggaagatatttaaacaatattgaatcatccagtcatggtctcaatggtgctctctgcattaagtccactggccaatattctttattagtaaaggtgttattcaaagatgtaagaagaaatcaaaggcatgcagcatgtgtttgtaggagtgactctccatcatttgtagctggcacagacatgtgcacagataccctttaaaaaaaaacaaaacaaaacagaaacaaccactagaaacaatgactaagtcagcaatggagtaaggccaaatcagtcaatcaaattaagcacatttctatataatagcaatgagcaataaaaaagaaaatcaaaataaaaacctattaacatggaaagcatgaagctgtgatacaaagtgattgaagaaaaaaaatgactttcttctactcatgtgcctggcatgtgcacttggcagagtgtacacccaagaatctacatctagatgatgacattccttcctgaacacatcctgggcaccttgccctaaccctaaccctaaccctaaccctaaccctaaccctaaccctaaccctaaccctatccctaaccctaaccctaaccctatccctatccctatccctatccctatccctaaccctaaccctaaccctaaccctaaccctaaccctaaccctaaccctaaccctatccctaaccctatccctaaccctatccctaaccctaaccctatccctaaacctatccctaaccctaaccctatccctgaccctgaccctgtccctgtccctgtccctgtccctgtccctgtccctgtccctgcccctgtccctgtccctgcccctgtccctaaccctctaaccttaaaggttaactccctcaaaatggagcagggtcaataatgaagagggatgtttggcttacaacaaaaccataatgaagaattcctttagaccctcaggtcctcttgctaagctaatctgagcattatctctttgaactgaacacccagggtcttttgtgtgtgaaataaaaatgtaaatgtgagcttccttaagtttagagtaccaaaagtcactcccaagcccaggcgagatatttgtgcgtctccactacttacttggcgccaaaatgaaggtttttttttttttttaacttctgtttgttacactctttttccccccagtattactattcgataaaagacatttccgttggaggcatgtgcatttgctacggccatgccagcagctgcccgtgggatgaagaagcaaaggttcgttctagcgttctatacttactgcaacctccacacagaaggtttagccgcctcatcctccattcttgaccgaaggcagacagttaagaggcatcacgtcaatttttaaaaatttaattaacgtaactggttttggttttagcaatggcatccacttgctttggttggagggctaatttctcataagcccttactgtgttatttagtttactgtgttagtaagatatctatgacaggaaattgacacgatcttccacattcttataagagaattgggcatgtgctgatataagttatatgtactatgtttatgattctctgcttttcagtactgtggggtactaaataaaggaaaaaatagacttgtttgggtgtaatactaagtaaataatttgaaaagagttggacagaaaagttatttacttccagtctttggagttctgtgtccccgttaagtagcaatattctcttttatttattttacttattgttaattctagttgtttaatctttacaccccttggggcttaactcaggcaagcactctaccagtgagacacaccctcagcccacattctatattaaaattattttaacatttatttatttagttggaggggtacatatgtagagtgcatatagtgcacatgtagagatcagaaagaaactcatgaaccccaactttcttattctatcatgtgactctctggggggttgtcaggcctgatggccagggagatggctgagccattcttgtttgcctgcttttctgggtttttttgtttgtttttttgtttgatgctgaaaaccatattgaaaaacatcagagaatcatcatccaaactacactaaaatcttttcataaaatattgataacgactcccaacccctaaagtcaatgcctctttttaaagaacactcttgttatttaacacgcatttgtttgtaatcgggctatgtgtgccatctcctccagaagtgcaacaccaataacttgatatcacgatgacatgagacagtcccagatccctcaccataaagagctaccatatactgacttcaagtggttgctttgtttttttttttccttaagtaaaattaagaataagacacaggtaacgttttgagctcttgtcccacatccttgttttgtccagcaactacagtgtcagtgtgaacacaatacgtgtggcgagagctgcgacaggtgctgtcctggctaccatcagcagccctggaggcccggaaccatttcctccggcaacgagtgtgagggtaagtatacttacaacctggagatcgaaggctccagctacgtggttggttaaactcatggcgtcttggttgtaatgaacattacatacttactttttcagcatttcaactactgcctgaagccaagcacgcctctgtgacatttaagggctgaggggtcgttgtagattcactattttacctaagtttcttagcccgtgcatttctttattagctacaaatctgaagtcgagatgaatgaattacttgattacggtactgggtattgaacctataggcgtctaccatgctgagaaatgttctaccactgaagtacatctctagctatcttggccagtgatgtggctcagcagggaaaggcacttgccaccaaacccaatgacctgagttgccactctgggatccacataatgggagggaggactcagctcccataagttgtcctttgatgtccacatgcagctatggcctgcatataccaaccaacaaacacacacacacaaacacacacacacacaccacacacacactttaataaaaatatgtttaaattaagattttcactttgtctctctccttcccacatttttttctgagcgtttgttatatacagactatatagtttgttaatacagactatattattcaaattattgtatatgtttatttgaatatattagtaaaataaaattgatagatatttcaaatacattatttgacataaatatttcacataaaattgaaatagaatttaaaattgaatgtatttgtaatgtttcctatgtgggaaatagcataataatgtataccattctgcagaattgctttttagaagtcagtaattttttaaatttagctttcccgcgtgtctctgcatgttttgcctgcttacatgtctgtacgttacttgcatacctaagaacattaataatctaagaacattagattccccagaactggaattacacatggttgtgcgcctccatgtggctgctgggaattgaaccctgattctctagaagagcagccagtgcttttaccttttaagccatctctccagcccatggaattgcttttaattttagacccaggtctcacatttattcaacaagcactcaacctctgatccacactccaagcctcccatatcattttttgagggggacacagggtctccttatatggcggtgtaaatgagggtcagactctctgtcatgcttcagcctataaactctgaaatagcacgtgtacacggacacacccacccagtacttttagttattttggtggcaattcccatttcctcctctattatctatatctgtttagaaagtatttatttatttaatgtctattggtgttttacttacatgtagcctatgcctggtatccatggaggccagaaaagggcatcagatcccctgggaccagggttaaggatggctgtgagccattatgtgggtgctggaagcagaaccctggacccatggaagaacagccatcttaaccacggagccatctctctagctcttgcctatatcttacagaattatttctgttagaattttaaaacacagatacttcatgaaataagggttttctttaacagggacacatcccatgcattaattgagatattaaaatatttcctagaatgcaactgtcacaacaaagccaaagattgttactatgacagcagtgttgcaaaggagaggagaagcctgaacactgccgggcagtacagtggaggaggggtttgtgtcaactgctcgcagaataccacagggatcaactgtgaaacctgtatcgaccagtattacagacctcacaaggtaagtgtctgcttcttgccactgcctagctcctctgccttctaggtggaagacatgcctcattaactctcagcctctgtctgaaggatagcttccttcctttatataccatggactggtggtcttcagatttttttctcctacagaggcttgctgtcttgcttaaagtgggaataggcggctattgttattcaatttgaattggggtcctgtgaggtgtgtaattgaagataattctaactataaatgtgcagattcagctaataactaaagggggccataccttagccactggatgcagtcatccagcccccaattgacttgatgagcccttggaattggcttgctcagtggccatgttcaaggatgacagtaataggtgacagagagaaggggaaccgtgaaaagaagaaagggtgacatgttgctgtcaccatcaaaaagatgtttagagcttcttgcctggggccattttatcttcctgacatctacatcccattacacagagttgctgtgatagtctcaccctgaacaggacactgatccctcatggttgacactgcggttattatttcaaacaatgcagatatttctggtgtcatccaggacaacttctgtcttgcaggtatctccttatgatgaccacccttgccgtccctgtaactgtgaccctgtggggtctctgagttctgtctgtatcaaggatgaccgccatgccgatttagccaatggtaaggacttggtctgctgtgtgtgcagttggtccagggtgtactgtttgtgctgggtagacttattactgggatgtagaaatgtgaggatttgatcctgtgtcgagtctatttattatcttctacatatattgagccctgtagtgtgtggggcttctgtgcatcccttcattctcttactctggctttaggagggtcatgctgttgtgtgggtatcccagttagttctatgactctgtaatatgtgtttagctatatcacattttacatatccgagtgtgtatcaattgctgggtggatatataaaaccgggtatttctattcaccaagggaatctaaaacattgactgcagctgtggtgtgctcacccacacacatttagtggataagccttccagctgttatgaataacactgctatgagcattcatatacatctaattttgtgagtgtatattgtatttactctgggatcaggagtggagctgcagtaacacatggcggcactgcctgtgggctttaatctcattgtctctcttcatatcagcgctacagcaaactgtggcccatgggccaaataggcacactgctgtttaaactgtgcacatttgcctatgtatagaccatggctatgtgagagcagttaagagtgactgtctacttagctttacctgaaatcttgctcaaagaggttgcagttgtcccgcgttggccctctacagaaagtttacaggacccctgctttaaaccctagaacttcacatgttaatcagtactgatgtttctcccccaggaaagtggccaggtcagtgtccatgtaggaaaggttatgctggagataaatgtgaccgctgccagtttggctaccggggtttcccaaattgcatcccctgtgactgcaggactgtcggcagcctgaatgaggatccatgcatagagccgtgtctttgtaaggtaagtgtggaaattaaggaagcttttttctttttttctttttgttttcgagacagggtttctctgtgtagccctggctgtcctggaactcactctgtagaccaggctggcctcgaactcagaaatccacctgcctctgcctcccaagtggtggctttgagtctcttctggggttctctgctcccctgggacagatgatcgagtactgtgaagagcaggaaggcttaagttagaaacagcatgtcccagcaagatggccctattctgtgcccttggattgagattggacaccaggcttactcttttgcggcacctctggctaatgaccatggattcccgaggtgtttctgtggcttcttagacggaacccaatactgctgtgccattttcttggcattgcctcccagttccgtgtttggaggcgcaccaggtacatactgagtttcccagaactctaatgaaatgcagatctgttatcttgcatttctcttgaaagagaattgtataatcacaggaatgcgcacacacgcagtgcccgagaagggtcttatttggccatatgatattaataaccatttccctggaattcttgagatttcctgtttgtacctcctgcctcattcccataaaagcagggtcctgtgcctgggttacatgtgacccagaataagctcaagcatttataagtaaaacaaatagttatacagccctctttaaatagggaaatgttagcacaagcagggcctgttgtgcatgcctatatttctagtgctgacggggctcctggaggggtttgagaagtggagatgaaccatttagcctgggctgcacagtaagatcctgtctcaaaaggaaaaaataaataaataaaacaaaacaagtttatttcaatgtattgaccaatctctaacgtcttaggcttgttctcggtgacagaatcaggcaagttgtcacaggctctctactcataaatactcacggcctgaggtttcccacgttctttgactatttatctgagtatttattacctgtttgtgtagatgctccttaccaagaccacatgcgtgtcatttctttctgtctgtctggatatacaccagcctcaccagctaatcttttttttttttttttacagaaaaatgttgagggtaagaactgtgatcgctgcaagccaggattctacaacttgaaggaacgaaaccccgagggctgctccgagtgcttctgcttcggtgtctctggtgtctgtgacagcctcacgtggtccattagtcaggtgggagaccccgcaactgccttaaccagcaggtcacggggccatgctaggaagccaggaggccaggtcttccgtcggagagactaaggcatccatgcaaggcagcccactcctaaagcattgctatgtgtttgtactaatgcacgtgctcattgccacatatgttttccaattgagacagttggctggaaaggtgctgcaggatatataacctgttgtcctttcttctgtaggaaacacttccccatgggagtttctcagtttggagtgggaggcatcctaggggtagaagaagagcaagagtagagggcgtggaattctagagcaggcaggctctggggtgtggggagggctggcgctgtgagtctggagggtttacagggtgatggctggaagttagagaggggcgtctgggctccgggcttaccactactgaccactagagtcacctcactaggaggctatcctcacccctgggcaagagagacattgcagtatagattctgaggttttaaaatattttttttatcatttgactatgaagcagagtgaagaaagaaaagatggtcagaagcaggaaaatattttaatcatgatacttatagtctgatcaccttatagctaagatactgggagcagaagaattttggattttcttttttggaatatatatatatatatataaatgttatatattatattttatacacattattatatattatatgttatattatatattatatatttcaatataatatattatacatattttatagatattatatatgtttctaatttgtatatataatatacaatatataatataatagatgataaatatataacattggaatatataataacccaatatactatatatgaatatattatataacatttatatatataaacattaatgtatattataaacacgtatgataaacatatataaacaaatattgaacatatattatatatctctatctctatatacatatacatattcgtgcctatatacatcttgcccacatagcctgaatacagtttttgtgtactgtttcgggtgtacctgttttatgactcaaatgatgtcaggtgtgaagattcccatataatgactccaataactctgggtttggggactttttagatttggaatattaatcctattagtatctttgctcttattaaaaatctaaaatgtgatgttgggtggagtgagaattttgtatatatcagaaacaggaatgtgctttcattttaatcgcaggtgtggggtgtggggctgcttcagactctctgcagcagctgactaggacttgcctcatgctttagcaggagtgctatttttccagctgtggatagtttccgcaatttcctgatgtttggaattctggggactttatttagagtttatattaaattccagggccccaagaggtgaggagctgttggttgctatgtaagtagtcatgggcaaaaaggaaatatcgagaagaaagcagacatcctaacggcaaagatcaaagttgccccaaggaactggctggcaccttcagtcagcaggaagtagtctaaggataacgtcaccgccttcccctctgcccctttctctctcctatccagtgttagggttgaaagggtagaagaagaagggtggaaaagggtggaagaaagaaaaacccgcaaacaaaagaagaccagttagagccaggtgtggtggccacgcctttaatcccagcacttggaggtagaggcaggaggatctttgtaagttggaggccagcctgatctacatagtgagttccaggctagacagagcaacatagtaagaccctgtctcaaaaaacaaaacctaaactatataaccctgatcttcgtggttgtgcttcttcggttgtgtgtaactgtgtgggttgaggtgtgtgtgacatgcacttagccttcctcgatcctagcaggaagcccttcactgtgttcgggtggccacagccctgctagctctctcttgagcgccaaatgtcagggcaaagacatttacacaggacttgatgcactctaaggtgaccctgatgccatgttctaaacttctcttcttcttctttttcttcttctccttctccttctccttctcctcctcctcctcctcctcctcctcctcctcctcctcctcctcctcctcctccttctcctcctcctccttcttcttctccttctcctcctcctcctcctcctccttctcctcctcctccttcttcttctccttctcctccttcttttcttctcctcctccttcttcttcctcttcctcttcctcttcttcttctaggtgaccaatatgtcagggtggctggtcactgacttgatgagcacaaataagatccggtcccagcaagatgtcctgggtgggcaccgtcagatcagcatcaacaacacggcggtcatgcagaggctgacttccacttactactgggcagctcctgaggcctacctcggaaacaaggtgtgtgtggtgtgggatgcccagctataaatctcagaaagtattaagaatttaaagcatacttactgagtttgctcatgcttgcagccagcatcatgcacacatagtctgcactagatctctctaatcctcttggatttttacattacagcatcccaccatcctctgctctgctgcatccagttcctaaacactgtcttgtgactcttattcccttcactgtgactgatttaccctttgttcctctgggtccctgagtggcttcagaccttctatggggcgttgctgcattgccactttgcgtagttcacaggagactctgcgcatggcccaacagagaatgcccagggagatgctcctgcagtggagtgtctgctcagctcctgttaacacatcaatacaaatgctgctcacgtgcgggttacagacgtgcagaataacgcccatttcatttaaggaaaatgaaagacaacaatctacatggttcattgtccagagagctgattgaagcttcttgtcattggtgtttgatttcccctagccagttaattatgcctggcctctccagattctgaccaactagtaaatacagccaagggcatccatttaaataactttatggtttggtttaaggtgatgctgtaccttcataataaactaaacttctagttatttttattgctatgttttctaatttgtgtgtatatacacacacacacacacacacacacacatatatatatacatatgtatatggtgtatgaatatatatatagaactatctgtctgtctgcttggaggacaggctcttgatgtgtatccctgtctggccttgcatttacacaccggccccagactccggagtaccggaagtataactgtgtgctttcacaggatgcctaacttgtatattataatacatgacatgctctgtttataggatatgatcaccagagagctttaaaaaatattcttgagatttcatgattgtaccattgcagtctgaattttgtgatgtattcctcatgaaaaaaaaaaaaactctccagtatacattagtgaccctccagtatatgttagtggacacccccaatatacattagttaccccagtaactaattccttgtatatgttaatgggcatctctcgtaaacatttaaaggaaaaaaatattttgagagcttcctttcagtgacatgtctaacaagattggcaatagtgaaaaggttcatttaagtaaaataaaatgcggctgccaagaggggtcaggaggaaaaggtgcttgctgccgagtctgagctgggttcactgcctaggacccacgtcataaaaggagagggccatcatcttccacaagctgccctcagactgccacacctatgccatggtgtgcgtgcccatacacaaatacatgcaataaaacccttttcaattaattaattaattaatttaatttgcatttggatgtttaccttggagacttgtagaagaattatatatctttctccaagtgtcaaagatttctttatcataaccatatctattaaatagtatctaatatgccttgaagtgtgaatttctttcatatggtcatcaggatggctcctgcctgtggatctcagcaatggtttcccctgacttaaggctatcactgttgtctcctgtccctcaccctcaccttactcttccagctgacagcatttggcggtttcctgaaatacactgtgtcttacgacattccagtggagacggtggacagtgacctcatgtctcatgctgacatcatcatcaaggtgactaatttgatttgatgtagagattggggtctggtggggtggcacacacatgaacacatacaacacatactcctctgtgtgtgtgtatgtgtgtgtaccatatatatgcacaactgcacatgcatatagggaaataaagagttcagtcaactgccacctcctggtaactctggattgggtcatatacttcgttgcatgtttgctctaagagcttgggtgatgggtacggaacttaattacggggcattaaattgaattacaagtgtctttcctctccattttatatgataggggaatgggctcaccataagcacaagagctgagggcctgtccttgcaaccctatgaggaatacttcaacgtggttagacttgtgcctgagaacttccgggactttgataccagaagggagattgaccgtgaccagctgatgactgtcctggccaatgtgacacatctcttgatcagagccaattataattctgctaaaatggcgctctataggtatgtactggaaggaatctttttacagagagtacaattttgtctttagtgttacttacttcaaggttactgttcaaacaagggatacagttatgggagctgggcgtattgcaattgctttcacacatgtaatgttgctgaaaacatgaggcacaagggcaagtacgtctggtcaggaagagatgactttaggttcagaaagcttcaagtgcagaaagcatcaagcttccaagcaatgcttagagttagcagcatctgaacctcactgcctccttgcccttcttcttgctgcctctcttgcatcattcctctgatgctaatggccttggtttggcacagttatttgggctactgagtccaacgctggccatttcactgccttgagggggttagtgtatggaagccaagtgtaaaattggatgcctctaaagtcagcctcgtccaacccgagaaaggatggtctccgtattcatgatggggcagctgatcatgaagaagtgctttttcatttcagtccaagtagactctgtcagagctttccctcagcagcctatgggcagtagtacttcttgtcaacaactgttggaacattccccagagaataatgatggctaccagggtgcttggtgaggactctctagctacacacagacaccacatgcccgtttcctttaaatacaccatgtaggagcctatcttcagtgaaccatgaggtcttttgcaagcatgagagctatgtaatgactcttttctgtttgcaggctggattctgtctctctggacatagcaagccctaatgctatagacttggcagtggctgctgatgtggaacactgtgaatgtccccaaggctacacggggacctcctgtgaggtactgctggtctctccttttctctgacttcctagaggaaaagtctgctgaagtcattgtaatggacaacatctgcatttaactttagaaaactcccaccatatttagactgtattgagttatgagagtactggacatcatgttttaaagagtgcaccttgctcttgcgaaggacctgagttcaattccagcatccacatcaggcagtttataagtgcttataactccagctccagaagcacacgacacctctgcatcatacacacaaaacatacatcgcacacaccagtgcacgcgcgcacacacacacactcacatacataccacagaccatacatatcaacatcacaccacatatatcacacacaccacatacacaccaagcaccacacacaccatatacacacattacacaccacacaccacacatacaacacagatactgtctctcccaaagattagggaattttaagtcagtaagattccataatgtaaccttacagctaggatgtgatcatattaacatttgggtctcactagcaaggttaaccactatgtatacagccaggcctctcacatggtcatggttcatggtcattatgaacatttatgattgattgtgatttctttccaaaaatcattttacaaggagacaatttagtcatttttaaatcagtctttaaaatcataaatggtgtagttaacaaagaaggcctaataacttatgaagtagatatttaagtactcatattttaaatatttttgcaaggtttttgtttcttttatatttggaacaaatgaacattttttttaggtataaagcatgaaaattttaggccaacctaatacattctaggtccaggcactccatgtgtaatgcttagtagatacatgatgctagaccacagaataagagactacaggtgtgacacaggggaaccctgcattagaggcggagccagcaatgccaggagagatgactgctcctagactcattccaaattcactgggctttgcaggcagtagtggtactatgcacaggctcatgcagacatgagagatgtaacccagctgtgccccagtagccctgagaaaccaatcccagggaccacggagagtatcctaacctgcctactgcatatagggtttaaggggcagactatgtccatatagcccagggatgtcatttttgtatactttatctcttctctaaattactaatgagaccgcgaccaatggaaatgcccacaatggaaatgccaagaaaagggttcttaaagaatattgctcaaggaatggtgaccaggaagaagttatctgaagcatattccataatcatattcattcactgttgtttgagtctgtgactacggtccctgagggcgagtcagccaccgcatgctttgttcagttttttttctattaagagaggagttctaccgacatcaggctgatgcttgcaggaatggatttctgtgcagcactttaagctgcttgcctgtgggctgacactcactaagtatgaggtagtatccagttggatgtaggcattaggggacttccatgaagtctatgtgaatggctgtatttattatctgtatacttttaaaaattcttgcttgggcttggttacacagacctttaatatgaggtacttaggaggctgagacagaagtattataaattcaggatttatatgggaaagttatcaagactcttgcctcaaaataagaactagaagaggcatggaatatagctcagtggtagagcacatgcacgtgcacagccatacattcaaacatgagtatgtacttacatatgtatgtaaatacatacatacacatacatacatacatacatacatacatgtggtacatatatgtacatatatgattaaaaacctcctgtctaagcatacctattttgaaagacagaaaatccaagcctccctgcttacacattcctgtgggtgactactgctggctttgacaaggtcaagcccttggcagttcgatgagatagggtcttggagctggacacagctgcctttgagttatccagaggacacaccaggtacttcttcacttcctgcatttgctagttacaaagcagaagtgctgttctcagggatgccttgagagctaaatgcaccactgtgcagagagggaacagttctttgcccccttgtagcaggagcagaacgtgcccttggctgcccacatagcctttccagcatcagccaatagaaggtgcacctgaatgcccacatggcctctctggcttcatcctacaaaggtgcacctgatctctttgctcggataaaccgacccactgtaacccacgcctgtccttgaacatgctcactgtttgaaggcaacctttaatgatttgcacgcaatgggagaaaattaggagaaacaaaatctgccaatgaagtagttatcaacccgtgagttgggacccctttcagtgtgagaactgtctcatccactgaatacattaaaaagatactaaagaaatgcatgctagatgaactcgctgcatggaggtaagtttcctgaaaagcaccggattgcacacttaaagagggtgtgtttttaaggcatggaaatgctatcaggattaaaatgtttgaaagtcagaaaaagagaaatgttttcctgcttacggaacactcaacggctcctgtccaagtgcccgggaaggaagatgcgtccgtgacacccagagtcacaccttgcctgctacattccccaggccacataggagagctttgactacacgctggccctcttttcttgcaggcctgcctccctggctattatcgagtagacgggatactctttggaggaatctgtcagccctgcgagtgccacgggcatgcatccgagtgtgacattcatggaatttgctctgtgagtttattgctgaccttgtgtgtccctaacctgctccttgccatgtgttgtgggcagtggctccctacctcagctctgtagagtcaccagttcttctgtgtcttcagatatcacctgcttttttaaaaaaacaaaacaaaacaaaacaaaaaaatgcttcatacattgttttatgagaggagttgaacatctttgatctgaaaacccaaattctgggactgttgacctgtgagtttccatcacaaatgagaaattccacacccatttttttttttcagaagacttgcattttaaagttgctgaatgtcttccctttcaggctatgtgtataaggcatacccaaaacataaattaatgtcacttctagacataggtcttatccttaagataccactaatatatatcatatataaatgtgtaagttagatggaaattataatatatgcaaatgtaaacacatatatgccaaaagtagaactttaaaaatttttaaatctaaatccaaatagaataataaaacatgataaaaatcacatggtaccatatttaaatttatagttagttcagctaaactgtacaaacaagagcccccttaatgggccgtgctagttggagcagggcttagtaaaggcacaattcaccttgggcacatgataatacttacctggtttcaaccaggtgttccttttgcctttaaggaacagaaaccctctgggtcgcatggattcactgctcaggaacagtgtgactgtgaatactaatagttctattatctggacaaggaagccccagccccgtgctctttaataaaaagatagattgagtcacacaactaaggaaaacctatcaggccccagagaagcatgaagcctggtatcccgggtgcatgctttcttattgttcattgaggggaccttcatttgttctgttttcctctttgttctggatggtttgtacccatggcaactttgggaagtgacatctgatagccactcagtccctctgggatggcttcccttcaaagcctggggggaggctgttgctctatctaccctcatcctgtcttgtggtctgcaagcccccactccatcccatcctaccccaccccaggcctcctgccaacatttgagggtgaccagcatgttgcagatacacttctagtgggtagtatagatgcaggaagtattaaatgtgtattaaataaagattccttgtgcttctataaacatagaggtgcagaagtatatatgaaataagttacatgtgcgttgactgtgctcacctaccaagtgcagaggatactgaagaaacaggtgctaagtgtgctgtgcatatttataatatgcaatattatgaattatatataccttgtatgtactttgtatatactttgtatacaagttctagacactttttagaaattgttttagagttagagggaaattacagcacactctagagtcccttggggaacttggccagcatcccacagttaagatctcatgtaactgacatccatgctggtaccataccactcactaagccacgagctctcatcccattagcttccacgcctgtccactgtcttttttactattaaaaccataagtcctctggcttagcaaagctctgtgtccctcagttcctctcttctatggtagctcatgctttctggtacttattctccaaggatcccaggccttctgcctaacactttcagctacaaattgcctcctacaatcctcccctgtgatttcactgggaccaggcactggaacatgaggccatggaaatgatacattttctcagagcctccaggggatcatgacatcactgcatctgcttctgggaatgccaccctgagccactcagataagatggtgtctgctagccttttctaccaagtgtctatccccccccctttaaacaaataatgtttacttttaggggggatgcgtagaaataaagataacatagatgagagttgaaaaagaaaaagcacacaaaaacttgcttaagagcagggttgtggctctgtggttgaggtcttgtcttggacccttctgtctttttctcttccaataaaaagaaacttctcaagagaggcccattggacttgcaaactttatatgccccagtacagggaaacaccagggccaaaaagggggagtgggtgggcaggggagtgggggtgggtggatatgggggacttttggtatagcattggaaatgtaaatgagctaaatacctaataaaaaatgaaaaaaaaaaaagaaacttctctttttaagagcaatgagtgctcttgccctctggcatccagaccaccagcagtatcagcatttagagtgtcccactccagagggatatactgagatacatgttccttgggcttttcagtagaattgctaaacagtttacacaaatagaaatttcagaatggctggcccttcaatcagatttcacattccacaggcaagcaccaacataaaaaaacacaagacttatttcaaagaagataagagtttattctggagccaaatactagtgagtggtggcccaggaattcagatttaggttaccccaaacccatactccaatgtggtaagagaagtttgtataataacagaacaaagatttattttaaggccccccttcaaatgtactggtggaatcaacatggggcattctctgctatgggtcccagatgctttctgctgacactctaagactttcggctggcagaaaccagtgatctcgtaaatgaatacattccaaaaggttttatctgctagtcataaggatgtcaggtcatttgagaggactgaagatatagcccaagataaatcgtaattaggctctggatctgcaacattccaaccttcccatagtcattggagttcttatcagttatccagccttgcagaaggttcttttttgtccattcgtgtctcaggccagcataacccagcattttaaaaatgtacaacaggattagttaagccatgtaatttcctgtccaatctctttacattctttaaatgcatctgggttaatgatcaaaggtcatggggtaaggggtggaaaagagaaccagactatgattgcatcttcaaatgcctgggaacaacacaggctttgcctggaagcttgttagaagcccaggatcgtctctgaagcctggatccaaatctatagctcactttggttggtggtcagcgtccatgtctgaagtaaggctctcaggcctaggataacctcaggaagaaaagctggtgcaaccctggcatgggatggatatgataccaggtgtttatagtgctgagtttaggtttgtatgcaggaacatgtcagcctcaggaattgcagcagtatacatagtgtagaagcgaaaaatcctattcaaattgatgcatgaaaaataaccaaggatagaaaatgagtggcttaaaaaggcttggggtccggtgcaagtggggtgaggggaggctcaggagccataaaatacagggtggatgcgtaaggaaactacgtcagggggaaggggaatgtgaggaagcttgaatggaacggccctgcagctccttgaagcctgcacctgagcagatagttggccctgccctaccggtgctctcttgcctgattcacttaccctgccctgccctgccctacccaacagctttatattttctccctacccacctccccctccccttccccatctctttctctgtggtttctcttttcttttcttttcttttcttttcttttcttttcttttcttttcttttctcttctcttctcttctcttctcttttctttctttctctttctttctttctttctttctttctttctttctttctaaaactacttgtctggcttggggttgctgacttagtggttataacttgagattcactgagcttctaggcctagtaggtttgtagttttatcacttgattctaaaaaaaaaaatcttgaacttggaaataattttaattttttaccccaaactcacaggactacaaatagaagttatgatgcctgctgtttaccccagctctcatattatggggagtacccaggcttactctgtgcctgtcatgcctgtaccctgtttagctaatcagatcttcgattactaggaaatgcattgcatatactctggatggttatctgtaaatccttcagtgtgcataccctgagaacaagaactgtaaccgttgtgcattcaaaacctaaaatgggttgagcggtggctctgctccccaattctatcatccatggtttttttctgagcttctaccaaggccaggcatcgagttgtattgtcatgttctctttaggattctttaacctaaagttttccccacaatcctgtacaaggcacattcaaaacaggcaaacaaaaacatcagtttagggttccagagatgactcacgggttgggaacatgttctactcttccagagatcatgagttcccagcaggtggctcagaaccttatctgtaacttcagccccaggaaacaagatgctatgctctgctctctgtacacacctgcacacatgtaccagtgtgcccccctgcaacacacacacatacatacacatgtacacataattaaaaacttgaaacctgtcaatctggaagcaggtggtttttttctgtcatttgtatttctgttcatgtgtattttagaacttggatttgctcattttctcttttaatgtgaacaccaccgtgttagtgcatgactctgtaaatcttgtaaggaagcctgaactgactgatgcatcttttcatgcatctggcctaggtgtgtacacacaacaccacgggggatcactgtgagcagtgcctgcctggcttctatgggacaccttcacgtgggaccccaggagactgccagccttgtgcctgccctctctccattgactctaacaagtaagtgtcaggtcctactgtctggttctgtcttctgtggccagatccccactgatgtgtgatgtgaagttgccaagcaagactgtgtcatgagtgttacttagcatgagtgaccattggtgagagaggaaaagagagagttcttttgttattaaaaatctgaggtatttaatgatgccaagatgcacacacacttttctcctcttggacccgtgtctgccggatgtcttctcaagcgtacatttggctgtcaagacaatatgctgatgaataaaacattgttctgtgtttgatgagatttgatcagatgagcaaattgtgaaaatatgaagctaaatctgtcccaccaagtcaacaaatatgcaatacatgcctgctgtagactgggtatcaaagtaaatgatctacccagcaagctctccacccatggctgctggccccggggactcggtgcaatcaagattgcaatggaggccaattccactgatggtgggagtgggtgggctaagggacttacttctctggagaagctctggtgtcagatatgataaaaaaagggacttagcagccagagggtagtgagtatgacatgttgggacaccataaacacacaccctgcttgaggaattacagttagtcctgaagcagaaagcagggtatgtgttgatggagctctttacattaaatcctttatttcaggccagggaatgtgagttctatagaccagtagtttgttatcatcttttctctccttttcctcctttttggccttttcttattctccccctctccctcccctcctttcttccttccttcccctccccctccctctcctttacctcttttactctctccctctcctcctccacccctccttccccctccccccatgtcattggtactctccctctacccattaccagtgaattccctccacaagggctgttgcttgaaactctagtatgtacaactctgctgtattaggctctgccactaccacagaattctagaagctgggtatttaggaagaaaacacatctacatctgttagttcattctggaggttccagaacatggcactagcctcttctgatggtcccatggtgactgcaccacagtgctggactgtgtgctagagatgggtcacatgactcagaaataggttcaggattggcttcatgttttgtaacagctcactcccatgagaactaacatagtcacatcatcatgacctcggtcccaaaggcaatggcccagtgaccaagccaccccttcttaatagtaccaccatgtgacacaacctttctgtatggaaaatgctgagccatcccaaagtggtagtagagatagttaatggttggttgccaatgaaatggtgaggtactgtctgtctttccaattaaggatcccccctgtctctgtatatatatgtgtgtgtgtgtgtgtgtgtgtgtgtgtgtgtgtgtgtttgtgtgtgtatgtgtgtgtgtgtgtgtgtgtgtgtgtgtgagagagagagagagagagagagaaagagagagagaatgtgtgtttttgtatgtgcctgtgtatatatctatatctatgtgtgtctatgtgtatatggatccatgtatctatctgtgtatgtatatctgtctgtctgtctgtctgtaagggctgtcttccaagcttgaaccaccagtgctagtgaaccacagcagagagcatgagcgctaatgcttccagagcatccaaattgtcttcttggggagacaagatcggccaggcagtggggaagaagcagttagcagtacaggcagatgttgggagctgagagcccactgtgtgctgaagggcagagcaggaggcagtaggcacaggacactgatgggcatgccaggctgtgccgcatgtcagaggcattgcattctggtctaaaggctgggagagaacctgctgaccatttcttaggacagatgtatcagaaaacaaccctttaaatatttagaaacaagcagcgttcactggacaatcatgctcatttctaatgttttacagtttcagccctacctgccacctcactgatggagaggaagtggtttgtgaccagtgtgccccgggttactcaggatcctggtgtgagaggtacttggtgccaccccaacccccagtttcacaaagcagcagtaacattgtttcaaaaacccagtacacattttatattttcttcttaaatatctacaaatcttcaatgttaaatgatgcatatcagttgtccatacccctgtagatatgatgtgataattcaatatatgtatacactgtgtagtgatgggtgattagaatatgtagttaagtgtggtcttggtgtcttggtgcattgccgttattttctaagatcatggatagagcaggatgcctactgagagaagagtgttccacctcctggggcacatcagtattcacagcaaggacaatggcagacggcaagggagatcagtagttaccgttgtcacacgtctgagaattcagttgttcagacaatagtgagggcattgggtggtctgatttaagagtcattctctggcaccccaaaggcagtcttgtcttttcccatgtctaagccttgatgcttggttctggttcagcctgtcaagagctgggtgacattctcagtggttaagagaaggtcatggttgcacagcctctaggtttatgctcatttggatctgctcccatctcacaagaagaaaggaagatttgtggctctcgggatggaaagtcacctcttttccatagcaaatcttaagggaaagagccagtctgatttattagccatcccggggagcccctggctggctcagtaacatcttgagcagttctattgactagatcctgcttcccaccttgaatatagatgtgcagatggttactatggaaacccaaccgtgccagggggaacctgtgtaccatgcaactgcagtggcaatgttgatcccttggaggctggccactgtgactctgtcacaggggaatgcctgaagtgcttatggaacacagacggtgcccattgtgagaggtgtgcagatggcttctatggagatgccgtgactgccaaaaactgccgaggtgagtgcttgaaccagggggtcacaattgttattcattaccatgtgaatctcgtaacatttgtcagaaggactccacctggtggagagtgtcttagttagggttttgctgctgtgaacagacaccatgaccaaggcagctcttataagggcaacatttaattggggctggcttacaggttcagtccatgatcatcaaggggagaggatggcagtatccaggcaggcatgggactggaggagctcagagttcagcatcttgttccaaagacaaagaggagaagactaggttccagagagctagggtgatggtcttaaagcccacaaccccaatgacatacttcctccaacaaggccacacctattcccacaagtccataccttctaatagtgccactccctgggccaagcatgggcccatcacagagaccttatcttgaatctgtcttgtgtactgatgattcagtctccgattgatcagatgtggactcaatactcaattcctcactctgtattctatggtggcttaattagcggttatctctgaaggtcagaagtctagaacattcatacccatcatggtcagggatggggttttctttctgaaaccatggcggtggcacaccctggtggtctgctcatgcgctacctgatttgctaagttctgtttggagccttgaaactagggatgaggtagaacaactccttgagacagcttcacacccctgagatgatcagctctggggctgttactgaatctctcagcttttgtatttttgcatagctaagaaaaagctttattgtgtgagagtttgaaacatccatacaatgtatcacattcgtccccagccctcccctccagctcctcccatcctcttcaacccctcccaactccccactgtgtctcccttctgatatcctgcactcggctattaaacccatggagtcccttccaagctcaggtagcagtgaaggggggtgggggtggggtggggggggtggcacatctctgaaggaaactctctagtagccatcagccaccaacgcagcctgatagtcccctctctacatcatgctgccatttctgctatctccgccttgtgtaggtctagtttttgaactctgtctcaaggaagggatgcacggataataatgccacttgtatattttgataattcaaggtaaacgttggtcttatatcacagcacggagaagaggtggtgccaatcatacagaaaaataaaagtgtaggcacacattagatgaaaaagggcctggctttggctcgtcaacctgaacttcagcatcatggacaccttaatttcaaatgcagggaagtgggtggtagatgggtcaaattctaaagaaagatcctccatgatgatcactaaatctcctcactgaatttagcacttgcagtgtcccagagactttgaaaagtgctgcctcagcacataagagacccggaggacagaaaattagaggtgacgttgatggacatactagggaaagagagggacatggtagagggggtgccacagagataaacatcagttaagtatgtcaaaaagacagggagggagaaagagagggagggaaggagaggaagggaggaggcagggagacggggaggggaaggagagaaggcgagctgggagacctccagctagagagcagttatctctgcgttgatggcctgcaggcttcgtgctggggaggtaggagtcatgttcagagtcaggctatgggatgagagagtaagtcctttctaaagggcagcagggttgtgtctctcaggatctcaggcaaagctagggaatataccccacatataccaagggaaaccaaaagctggaaggaagccaggttctcaggaaaagtggattagccaggaagctgatcccaggccccctctcaggctgtcaagtcttcaggtccagggtcaacacccctgcttcggaggttgcttcccaccctgacggggctctcattgtctgtgaagtatgttagctttgtgaatgtgttagccttctccttatgggatcaaacggcttccactcaaattatctaagtaaataaatcaaacccttttgtgggtcttgtgtgtcctagcctgtgactgccacgagaatggctccctttctggcatctgccatctggagactggactgtgtgactgcaaacctcacgtgacaggacagcagtgtgaccagtgcctggtaagactgggcattgcatgatattcagtgacttgccggtgtttagaattgacacttagcctgcgtcctcgggcacttgaattcccatgggaagagcctactcgtaggcttggtcaccatgtgctgagccttccccatcaagagaacacggatgcagtgtgctcagaacatgcaggcagtgggcccgggaacaggcatgtactatcattccgagaaacaccttgcctgtgacttagagagcatcccattgtgtgttgaggagaaggcccgggagagcattccaccagcccactaacaccctggttcttcctcttttgtgacatagtctggctactacgggttggacacggggcttggctgtgtgccctgtaactgcagtgtggaaggctctgtatctgacaactgcacggaggaaggacagtgtcactgtggaccaggtgtctctgggaaacagtgtgacaggtgttcacacggtttctatgcattccaggatggcggctgcacacgtaagtgctggggtaccttatgttccccatcacacttgccctaccacctctcttggtgtcggagtaacttctatgaatgttacttctctcctgtctttatggtggggctctatacctgtcttctctttctaacactttggttctagcgcccgacctgcttgttatgtgaatttggctctagtttttgagacccccaaccgcagtccgcaagcagcagcttttgtaagggctggggggtgacatctaacacaattgacagctgataagaaggcaatgaccttagagcaatggtcctcaacctccttactgctatgagcctttactgcagttcctcatatgatggtgacccccccaaccataaacttattttccttgctatttcatgattgtagttttgctactgttaggaatcgcagtgtaaatatctggtacgcaggatgtgtcatatgtgacccctgtgaaaaagttgttcaacttccatcggggtttcgacccataggttgagaactgctgtcttctgtccttctgtccatcaggtctgtcccattctgttgacctctcagacccagggtgagtcaggatgcgcagctgcctcagggatagatgatgaggtctcgggaatcattgcatctcttttaatagtggttccaactattaataataattgtgctctcaagctgtcacacttgggtcacatccccccgtctgaatctgtgatgcttcttttgtttcagcctgtgactgtgctcatacccagaataactgtgaccccgcctctggagagtgtctctgcccgcctcacacgcaggggctgaagtgtgaggagtgtgaagaggcatactggggtctggacccggagcaggggtgccaggtgggtgctgccaccgcgctggagtgagcattcctcccctgccgcaaactgactttatccagtcacctggctttaagcggttatattgccatggttcatatgtaaaatcggtacaccctggaccactggccatgcacctagagtcccagctacttaggaggccgagtcagggggattgtttgggtttaattataggattgtctggggagatagactgtggagacctcacctttaaataaataaatgtataaataatggacttggaagagtgcaggagaattagcatctttcaaatttcttattttgggttttcttcaagaatttagctgtgaaactgatagatagaaatgtgcattaatatagctatataactatacaattatatacttatctatctatatgtagttttatagatatatagatattgacctttaaatatgctttcaactaatctacattctatgttttcaaccaatatatatattttccagtggagctgtcaatagtttcattagagaattaggttgaatccaagagctcggttgtcctggacttaattagcttagaattaggtatgcttgggttttagagtagtggggatattacttctcctctataatatttttgctgagctaattgcaccattagatttaattctagttcagagatttaacgctctgtgttggtgtcaccaaggtacacacaggccttgccaggcagcctatggtacctggcaggacagctccacttaggaacagcgcaaggtcaattcatctacattatgccccagatggtgtttcttctggtgtctgagtttctgtactttctgaggacataagttctgcccttatattaactctctctctctctctctctctctctctctctctctctctctctctctctctctctctctccccctccctccctccctccctcccaggcttgcaattgcagtgctgtgggctccacgagtgcccagtgtgatgttctctctggccactgcccctgcaaaaaagggtttggtgggcagagctgccatcagtgttccctaggctacagaagttttcctgactgtgtcccctgtggctgtgacctgagggggacactgcctgacacctgcgacctggaacagggtctctgcagctgctcagaggacggtggtacctgctcctgcaaggtattgtggatcttcgaacctcagtttccttctgctgttgtcctcctgcccaccccaggggcgtctgactacttacataaattctaatcattagaaatacagtttcaacccctttctcggattgtttcatacttctatatcacctgccagtcaaaaaagctgatggccaatgagctggggcaagaaataggaggtgggacactggcaggaagagagagcattctaggaagcggtgagagataaaagatgagatgggagagagactcagggagactggccgaggagacacatgtagagaaactcagagagatgccgagggagacactgaggagaaacgaagggagaagcaggctaggactgaaagagaggttaactaatcattggtagacatagactagtttaaattggttaagtaagtggagagctcttcagggaatgagccaaagctcatggcctaggcctttaataataagcagtctcagagctgtcattcggaaagccagggccaagaaaggaaaaatggatttaaagttattgtaacaattcacagtgttctcccctgaaatggtggaagaagagtcttagaacagaattttaccacttacaagtgtctggtgactcaacttctctgaaggcagtgctttctggcatgcaaccatggattgagtagccatccattcttgaagaaacaaagtagctagcaaggctgtggggaagatatttgggggttttatagctatgctctcagaatggtgagatttgctaaagtaaagggagactatgtaaaatattttcccatgaggtaagagtttgatgtcactttgacttacacatgtgtcctttggttttcccagcatgctttgttgcctggtcactgccaccttctatagtcgtctgtgagaggaagagaaggaggagaaggcagcctcggcaggggtgttggtgtagggctagagttgatgaaggaaggattcacagaggttcatgtcttaccatgtctcctagcaacagtcctaactccagtccgaatggcaaggacctggctggccttcactaggcctggggtttcatctggaggccctctggatcgcctagagaccatggagattaacattagcaaatatgtcttggtagtttcttccaccatagttctgatcctcagtcataactcaggagttctgagtatctgacttcagtgagaagcgtggccaccagagactgagtttagcaacgcgtgttttattattttgtcagtgtgttttattattctctttgtgtgtgtgcataaagtcacatctcttctttttcaggcattgatttattttctttccacctgtaggagaatgccgtgggcccccagtgcagtaagtgccaagccggcacctttgccttgcgaggggacaaccctcaaggctgcagcccctgcttctgcttcggtctgtcgcagctctgctcagagttggagggttacgtgaggactctggtaagccacatacctacagtgaaagcgttttagctctcttgctttggggagtcaggtgggcattgggagagaacaaagacattagaaatcctaggacagtgattagctggctgtatgagtcagtcctctgatcacttcttcggtcaggtgatataagcagagataaaggctatctatgcccaccttcagctgatccaccaaaagcttttcttggaaagaagaaataactataggatctccaaagtgtatttcctgtcactgatgctccagggtagcaatcctttgaacctaatcaatcacagtgccttggacatcctgatccaagcctgcgacctaaatgaagtctttcctctctggtgttaaaatgaagcttttcttttggggaccaccaggagaatctgcagattaaatctgggttgtgtgtgtgtgtgtgtgtgtgtgggtgtgagtgtctgtgtatctatgtgtgtgtatgtctgtctgtagtgtgtgtgtctatggtgtttctgtgtgtgtctgtgtatgtgtctgtgtgtatatatgtgtgtctctgtatgtgtctatggtatctctgtgtgtctctgtgtgtccgtgtatgtgtctgtgtgtatatgtgtgtgtgtctgtgtgtgtgtgtctgtttgtctggtgtctgtgtgtgtatgtgtgtttgtatgaatgtgtctctgtgtgtcagtggagtctctctgtgtgtgtatgtgtggtgtctgtgtgtctatgtgtatctgtggtatgtgtgtctatggtgtctatgtgtctctgtgtgtctgtttgtgtgtctgtgtgtatctctgtgtgtgcctgtgtgtatatgtgtgtgtgtctctgtgtctgtgatgtctgtgtgtgtatgtgtgtctctgtatgtgtgtgtgtgtatatgtgtgtatgtgtgtgtatgtgggtctgtggtatttgtgtgtttgcatgtgtatgtgtatatgtttgtatatgtgtgtgtatgtgtgtgtctctgggtctgtggtgtttgtgtgtttctgtgtgtatatgtgtgtgtgtcttgtgtgtgtctgtgtctctgtgtgtctgtttgtgtgtctgtgtgtatctctgtgtgtgtatgagtgtatgtgtgtgtgtatgtgtgtgtgtgtctgttgagtatgtgtgtgtgtgtctctatgtatatgtgtgtgtgtctgtgtatatgtatgtgtatctgtgtatatgtgtgtgtgtctgtgtgtgtatgtgtgtgtgtagtggggtgcacgtgagcagaagtcagaggaggatgttgactatgccctctccattattctccactatttcccctagaacctgggtctttccttaagcttggagttggttagaggcccttaagtcacagctatccctctgtctctgcaaccccatagcactgtggttgcagatcagcaatgcagccaaacctggtgctttacaagcgcgctggggattaaatcccaggtcttttgcttacccagcaattgctgttagccactgagttatgggtacttagctcctcatataacgcacatctttctccttcccatccctagataactctagcctccgatcagcccctcctgcatgtggtttcacagagcaacctcaagggcacaatcgaaggcgtgcatttccagcctcctgacaccttgctggacgcagaggctgtccgccagcatatctatgcagagccattttactggcggctaccaaagcagttccagggagaccaggtgagcagacatcagctagccccttcctgttccagaaagaacctcagattcgatcttctgcctgtcactaaaggacttggatatccagtcgctcttctgagtgaaggtggagatgttctgtggttataaaaatccccacaaaggcttggaatttcaaacgtttttatttttaaagcttttacggtttcattaatttgcattgtttttttctcttttctaaagcaataattcaagaagtctatcgtataattaccagtagcagtgctaggtctgacccgggagcccttgtatagaaagctaaagctacgattaattggagagctgcctcttatgaacacaactttcagtgcagcgccttgtttataagaacatgagttcactctgatctttatgttattctggttttttgtttgtttgtttttgtttgtttttttgaggtaaggtttagtgtgttagtccaggctagctgcaaatttccaatcctcatgcttcagtgtagcgtcctaagtgccaggataactgatctacaccaccgtatgggctcactttgatctttaaattttaaaaatctaccccagttgtcctatagatatagatgattttaatttaaagagcctgaaattagaatccttacctcaccagtttcttctgagactgagtttggtggaatgaccagactagtttcagtctatctcacagaccatcaataagcagcattaggtggaggcagatttccctaggacaaactaactcccagttggatacattgtaatgacaagctttgcataaagtggccttaaactaaggctgccccagaggaataatgcaagtttgttgtttgttagctcttggcttatggtgggaaactccagtacagtgtggctttctactctacacttggcaccggaacatccaattatgagcctcaagtcctcatcaaaggaggtcgggccaggaagcacgtcatttatatggatgccccagcgcctgagaatggagtgagacaggattacgaagtgcggatgaaagaggtgatgtatggttgtcccacatatgttccttaggcatgcgaactttgctgtcaggctaagaaaagcccagagccaggagaccctgggagacagcctccagccagctgacagagagttctaagagcgattcatatttcatggcttcaacaaagccaaacgacagtagctgtttgcttatctacagctttgcttttcatggagttggatgttaagtcacctgaagtccagatatatcaaatggaaaattccagaaacaactcttaggctttaacattatatactgtttctagtctcatgataaaaccctacatctttctgccctgccctgccctgccctgccctgccctgccctgccctgccctgccctgccctgccctgccctgccctgccctgccctaccaggatgtgtcttcccccttgtatgtaccacctgccttgtaggttacagcaaatctttgtcagttcattgacctacccggagcagggctgatgtctgaagctgtctgtaaaagagctgtgttctccttttaaggttgtgtgtctgtgaagctgtgaactctgaatttcattggtcccatttctcattcacaggaattctggaaatattttaactccgtgtctgagaaacatgtcacacactctgattttatgtctgttctcagcaatattgactacatcctcatcaaagcatcatacggccagggactgcagcagagcaggtacttgggagcttttagaacgtcacgtgttttctttacctgatgcagaagtggaagatctgtcccctcactccaatgacttatgtctttattcatagatagatcactgacccttgtgtaaatcttgccagtattgacggcttattagtcagtgttttgttgctaggataaaatgcctgaggggaaacatatgatgaggagagaaggttccttctggttccgatgctcgtctgttgctgcgataaacactctggcacaatgtacattctagaagaaaaggtttattttggtttagggttccacagggctagatggtgactgggaggtgaacgcaggcgcttaggacagaaagcttaaccacataggcgatgctacatgaactagaagtggagggaagctgtcacccctccaagtccacatcctcccctcagcgatatgttccctctagcaaggccatacccatacttcttaaagctctatgctttccccaacagtgccaccatcaggggatacacaagcctgtgcggggctatttctcatccagacctcaagagggtcatagttgaggaggttcgcatctgtgttctgctggctccatcacatactagctgctcaattaattcatagcagtcaggaattagaaagcaagcgagccagggctgggtgcaaaatgtccccttaaaagcatgccctcagatggggaccctgttataaacacagtagctttgtggggtattccatcaggactatcatactataattatgggatggagggtgttaactacaactattcgcctcccatcttagatgaaatagaacacttctttataaagactacatagacccctgaaagctaagctgtcctcccccaaccccccttgtttttggaaccatgtctaaggataaagccactttctgtgatacctcataaggaaatgtagtcagtgctgggcagagccgccctggcagggtcttgaaggtgttcagacttggacctactttctgtcaccgcctattcctgctgcatgctgacatgtctgcaattgttagcagcacttctccacaggatgaggtctcggctcaggacagatgtaaatgctaaaccttgtacaatgtttccagaagtttgtcacattgtaaatgcttcttgccctgcctctcttcacaatggtgccccagaattgccaacatttccatggaggttggccggaaagctgtcgagctgcccgctgagggcgaggcggcattgctgttggagctctgtgtctgtcctcctggcaccgcaggacactcctgtcaggtagggaaccttcagttcactctgtgccctgggatatgctcattgacaacaatcctgcatggggtagcaacacaagagcatccacaacttggcttttgaatttataaatgttagtttgtttaaattcagatttatggactccatcaacttttgagtgtaagatctggcagcatgccatgtgcttacagttctggggatacagttgttctctagaatattcttttctcttaccaaactgaacctgcatctcttaagccagccctccacttgctttctgctccttgggaccctggctacctctagtcccccaatgagtggaatcctgaagcatttctgcttttgtggctgccctctctacttagcacattgcctttgggcttcctccaggtttaacacacactagactttctttttgaggctgcatgatatcccatcacttggacacagtcattatttttctgtggggccttgggttgcttctgtggacgctgctgtgaggaagggaatgtgagtgtctcttccggatgctttatgctgttctttcgagcccaccagaggtagacttgctagccttggctaatgtcgcttttaattttggagaaccctgcagtctctttcctctgtgccagctgcacacaagcacaccacttcctttacaggcccaacacgtgttctgtgttgttactttggcttttgtgcagagtttggacttttacttttgttggtggtatagtgttttgagaccgctattttttttttcactctgcagccttggctagcttgagacccacttcgtagcctaggctagactgcagctcacaggagtccctgtaggtgtgattatccgtaggagccagcatgctcagcttttagcttggatgtgatttgcgtttcttcccgatagtggtgtggtgcttgcgtgctgctagccgtctgtaatcgctggagaagaattttcatcctgtgccaagattttcaccaaggtctactttcttgtgccttttgtacccttttaggactgtgctcctgggtactacagagaaaagctcccagaaagtggtggcaggggaccccgccctctgctggctccttgtgtgccctgcaattgcaacaaccacagtgatgtctgtgaccccgaaactggaaagtgcctggtatgtttgcttgtttgctaaatttacacgttatcagcgtgacttaaaaggagaaggctagggaccagacaggccctccaaggacctccaggagttccttgctgccatctctacctagaaggcatctctatctctacatcactggggcactgagtctccctcagcaactaatgtcgcctcaactctagtcctcagtagcaggactcttgtcactctctaggatggcagccaccaggaggccagaatccactgtctgctaggggagctgctttgtgctggacttgacattccctggagaacacctagagatgtctctgtcctatctcgtcttctagtacttggtccttgcctgtgacatgctatgtcagtgaaacagtgtttattgcaatttatttttttaagagatcacaaagaccccattctgaagggagacagagaggccaagtggatcctaacaaaacctatctttatcagttgaaatgggaataaaattttaaaacaaatttggtcaagtgttttctagttcgagagcctataagtgtagttttgaaatatttcttgctctgtcacttcttgctgtcaaggggaaaaggtgattgccctctcagggactctggttctggtgtgtcccctcctcagctgcaccatacagggtactgtgtgcacaggggcagagcaaatatgcagggatggtacagcacagggttttaaatagaatcggtcatgaaagttgctcacactttgagcttaaacatgcatctatatactcttttctttatcagtcattttatttgtttacatttcaaatgatatcccccttcctggttacccctccacaaaccccctatcccatccccctttccccatcccctttgcctctatgagggtactcctccatccccttggccacttccacctcacccctctagcatccccctatgctgggcatcaagcctccctcctctcccactgatgtcagataagcccatcctctgctacatatgtatctggagtcctggctcccccccatgtattggttggtggtttagtccctgggagctctgagtggtccagttagtgatttttgttttgttttgttttgttttgttttgttttgttttggtggtttttggtttggttttgtttgggtttttttgtttgttttgtaataaggtctctggctcaactaataacatcgtattttaactgatcataactgatgtttatttggttgttaaaagaatttgccacaagtgtcctccctccacgggttgcttcctaaatcactggctaattctcttcatccagggcagctgccagtgaatactgaacagtgacttagttacttttctgtcaccgcgagctaacaaaagggagagtttattttgagtttgggttccagaacagggagtctttatggcaaagcagtcgtagcagccagagtaggaagctcagagataggtcacatgttgcccacacacaggaagcagagaatgaactgggaacggggtgaggccataaactctcaaaggccagccccagtgacttgcttcctcctgcatggctccatgcagttctaagttctcctcatatggcagcgccaactggagaccaaacacccaaagacacaagacgtttctcatgtcagccacatcaagccctagctggcatgtggacacactgtcgggtctctatctactttagatctgcatttcgaagatctgagacctgactgcttttgggtgccaggtttgtactccttctgtagatcatattggcagtttctaggctatatgacttgtcatggtcttatagtgaataaaggtcacagatttggaaaagcttccagagccctaggaaatatgaagagaaatgcctccatcttccctaagaattaaagagcgtctctctgataggaagcatggttggttatagaactatcacccggtagcattcatgtctgactgtttccattgttcctactttgaaatgtggaacttcagagctgcagggaccacacatccggggaccactgtgagctgtgtgcttctggctactatgggaaggtgactggactgcctggagactgtaccccgtgcacctgtcctcatcaccctcctttcaggtaagcctgtgccgaggcagcaggacacagcagctccgtccacttacgggggctctgagtgctctctgttaatgtcgtccctgtggggagatgctaagcacatgctaagaggaagtgtgtagtctcggggctgtttgaataggattgtgttggtatggagggttagaatggagccaaatttacaaataggcctttgggatttttcaaggcaaattttagctctcagctgtgtggtctgctgtgtgattcagttccttttgatgtaagggaagagggtggtgtagacgtatgcctaggatgaaacacacaagccctgagaaaagatacatgatgtgtatctgtcagtcaataactcatttgggggccatcgcactgcctatgctattgactagacaatgttgacaccattctgaaaaaaataataatttctgtatgtgtattccccatctgtggacagtggttttgtgcacccagagatgtgcacacatgcctgtttcactgtttgctttacatatttccacatggtttggataatgactttgtcgtcccccgaacccttagcggctacctaggaggcaccggaatgaacaacttggagaagacccagatcgtttggtttatttcttaggcatttgtgtctccttgaagcctcgttatttaaggagagagatgttagaggtagtgcagggctgggaactctacctgtggatctccagctttctcccctgcaaggaaccagaccagattcactgctaggtttgggtgaggtttcagtagtttgcagttacccactcccatctccaggtggcgcaggacagtctatcctgtggaggcagagagtgtgaccaaaaaggaaccagccaagtagctctatcaggttacttctggtctgtgaatgactgccagccactcattaacccagaagtcagcttctctgcggctggtcctctctgctcattgccatagcctggggagctgtgatgaccagtgagatgcggtcttcctaatccccatgctttatcaattctgccattagctaataaatatggaaacgcctcctctgagaataagaccccttttgactgggaaagcgttcttggctagctagctataatccaggaggctgatctgcgtagtactcacctgatgccaccttgcaacaagggcctctttcaacacaggagacaagagatttgtgtccataatcctgcccgcaggttccttttgttctatagatttaagctctagttcatctagccatgaagtgtgacgttttgaacagtgaggatgaataaatatttaagaaagatttgaaagccaggttcctgaaactttctggaaaaagaactttctttcagtttcagccccacttgtgtcgtggaaggtgacagtgatttccggtgcaatgcctgcctccccggctatgaaggacagtactgtgaaaggtatgccgatggcctgtcacaaggaggtagatagggacacctgctccttttatagcatatggtgcatgcttatgatagcaatctgggagtcgatacaaatgtgtgtgtttgtacagatgggtgaccacattgctatcctatagcaaggtctcctaaagtgagtgggggctctgcagttcctttggcaaaaataggtgattgcccctggacagagtgtgttcctggttggaaagacagctctgtcctacgcctcttttctgtaggtgctctgcaggctatcacggcaaccctcgagcagcaggtggtagctgccaaacgtgtgattgcaacccccaaggctctgtccacagtgactgtgaccgtgcatccgggcagtgtgtctgcaagccaggagctacagggctccactgtgagaaatgcctgccgagacacatcctgatggagagcgactgtgtttgtaggtgattctcctgtgtgtgtgcctaaagttgggtttccctcactgacgagggacctggctacagcacccacagggtcagtgggataccacacattgcactgtactttaagttttgttacatttcctggacacatattgccgttaaacctactgaattgaacctttagttgtgcatgaataagccaagacacctttgattgtggtagtctcttgagatatagcccaggctggctttgaacatcacagttctgcctcaatttcccaaggactgactgagactaaaggcacccagctactaatcttgactgcatcatttagcagtgtcagtagttcctttactgaaaccaagcatcagtaagcctggaagagaacacccctgtggggttctcatttgtattgcccaaacttcaggcctctttagttttctccagttttgatggatgtctctgtcaagtgcaagacaaggtccccctgggaagtcttcgtgggccattgggatgctatctcgtgatactcaagggaaaaggttttggattttgtttctgtgtttgtgctaagtaaataaccccgattctggtctccactgccctctgtccttgaggaggaagtcctggaacgcccagactgtggagacaaggctagaagggaactgcggttcttgttaccagtcccaattaagaggaatgaagggtcaagtgggagggaaggagagctgaccactgggctccctgtcctttctttgtgacactgagggtgtgcctttgctgagcctcagtcacctggttgagaattgcagctcccctatggcaggaatgtgaatgagatttgtatggttcacggggccctgagtgtgcgttctccttccaataaataccatggcttgtgtagctcagggataaaagcctattgtgttagctttgttttctccctgtgttctcttcaagcctgtgatgatgactgtgtgggtcctttgctgaacgacctggattctgttggtgatgccgttctgtctctgaacctcacgggcgtttcccctgctccctatggaatcctggaaaatctggaaaatacaactaaatatttccaggttggtgctagggatatagagatggtggctaggaacagctgtcactgagggagaaggagtgggggtaattttctccccaacctttcagtcccccatgtggcctgggacagtgaccttatcccacacttcccttgggtttctgggagctctaatggagttgcttctcagaaacctatttgggtattcacggattttgtcccaccttctggaattaggtggcacctcctgccccgacagacctctgggtatttgaaaaagctgtgtcaagtacaaatactagaaataaacctcagccatgtctgcttcagtgttggtttatgccaaagatgagccattttctgatacatgctgctatttttaattagagttccaggacacaaaaaatagtcttcctcctcggctgactagtaaagtctccgagggtccatccttggtttatgttttagcaaaagatctggtcaacaaaggcaagaaaagttaagaaattgactcagagacagcactctcctctggaatggtaattctcattggaaaaatgttgctaaattatattttttacctctacattatatttaaaataatctattcagtgtgtcatgaagtaagaggaatggtcattactaagcactagattatagatagaagcttccccttagtgtgtgctcactccctcacacatgcacccacacattcactcgcacacttacacaagcactcagaaactcacatgcacacatgcactcaaacacacactcacacatgcacactcacatgaactcacacacacattcaggcagtcacacacacacactcactcacatatactcacacacacacatgcacactcaacactcacatgaactcacacacatgcacatacagacactcacagacttacacatgcacacaagcacacactcatccactcacatatacttatacgtgctcccatatagcatacactcacacacaacacatgctcacacacacagactcacactcacacactggtactggggaggagcaaatatttttacatcacttcgtattgcatagccaaatgtgtttttcgaaagatgggggggttagtcacagtttagtcacaggagtatagctgtgttttgaatttatcaggtaactaagtagttgactcagatcttaactaagcctgactggtttgttctaacctacccactgatccccttaacaatgcttcacatttgtatccaaaactctttggagggtaggaatgtgaacagaattgtttctattttttaccaatagagtgaaattgggcaatgtacctccacccttccctaaatagcaatgtgatcgctctatagcattgtgaaaggttttaggcagagaagaaaagaggttagaatgttggaatggattaagcacttaattataaaccattgtgatggcttcttattggatacattgtaactttagcctaggaagcactcctttatgttttgacaattatcattaatagtttacaaccttgagagtcaaataaagctgtatttggtctacaaaattgccacctatctcaggttcctcttaagagaccagtgtttgaatttatgtccctgtaggagccacacagaaggcagcaccatggagggacattgctgtaattgaaggctgatggtgtccaaacatgagtccttttcttttaagtaactcttaaagaaattaggatgtcttctgcataccaaaaagcaattagcccatgactctctgaagaacggaatactttaaatgtgacacagtcagcggtataattgctttaggcagtgtaatgtctgtcttttggttttcctagaggtatttaataaaggaaaatgccaagaagattcgagcagagatccagctcgaagggattgcagagcaaacagaaaatctgcaaaaggaggtgcgttctctacacaaagatccggctccagacagcctgtcagcacagcgcctgggagccattgggtctaacctggcaggttctagaggttctgatgagctgtacagcagacacatatcaacaggcagttctaaccgaagcttccctgctgcagtgggaaaaggctcctgattggccactgttgccctgggtcgctaaggaagaacacggtgatcagcttagcttcttgccttcgcttaccctaagtggtgctccaagataactgaaccatcccacctttcctaagtcgagtctgtcatggcgtttgtgagaagcctgggctgtctgttgaataccaaccagcctgcttgattcaacttcccaagcaaagcagacagtgtagaatgctctcaggactcatttgtcttgtcattcaatgacgcatgactgtctacaattggatgctaatgtggatagagggctttcgctttatggcgggggttcgaaacctgtaggtcatgaccccttttagggggtcaaacgacgctttcacaggggtcacctgagaccgtcggaaaacacggattatttacactgaagtttgtaacagcagcaagattacagttatgaagtagcaacaaaagtaactttatggttgcgggggggtcaccctaatatgggaaaatgcattttaaaggggtacagcatcaggaaggttgaaaggcactgcagtaggaatgcaggaagcaccttgacctgctctgctcatttagattgtttataaaaacaaaccatctcttctcatggtgaatgtgtgatttcaatacccacctagtcaaatttttagccccgaaatattaaccttggttcgagatagcatatattttcagttctggatatattttgttgcttaaaagaggcaacagctagagttcagaaatgtgagcgatactcaagtaactaggctgaatctctcctgtctgctcagctcaccagagtgttagcacgccatcagaaggtgaacgctgaaatggaaagaacttccaatgggactcaagccctggccacgttcattgagcagctacatgcaaacatcaaaggtagcatgggcagactctccactggggacttgtgcttatagatagtaagagtcatggtcaccatgtgatgtgtgtgagcagtgcaggactgggcttcctagggctgagggactggaacatctgatagcacaagcacccagaaacgttcaggtcccaggcttccgcagagtgtttcctgttttcaattctttattatgcctggcacttggatccatatctccagcccctttccagcaaagttgaaatgctctatccatgcctacttacccacaagacagctgacaagcttggggctcctgcttggtgccagctaccctctcagagtgcttctgctgctcgcttacaccgtctagcgtgtggttgtcggtttcttgactactagaaaagttccatgctgttcattcagagctatgatgtgaagcatccaaggcacagaacgcggtgccgaaaagatttatggggaatgagtaggagaaggatcagaacaagaatcgctcagtgaaagagtggtgccgggtagatactgctttatacaggagatatggctgcaaagtccacgtctgcccaggcacagggcaacatggtagcgaacatagagccagcccttatggatttgtggctgtagaggaacactaccattaaatacgccaggaatccccagtccctgggggtggcttgttaggtgatatcagagagcacttgggtgcacagggtgcttagaggtccaatccagcctagatgttccgagctttcctcaccaaagagcattccacacgcttccattcactactgtctacccagaagagacttactcagtgatgaatcttctccatagaaatcacagaaaaggtggcaacgttgaaccagacggcgcgtaaagatttccagccacccgtgtctgcccttcagagcatgcaccagaacatttcgtctctgctgggactcatcaaggaaaggaatttcacagagatgcagcagaatgctacccttgagctcaagtaagtcctgcgtggggtcagaacactatcatcagtgagaaccaggtatctggatgctgggagcgggaaatgatggagaaagtgatggctgagaattaatattgccagagaggagagaggccggtggccaggaaaggaggagaggggcatctgcccctccaaatacagaaaccgagtaagcgaaatcagtagcatccatcactggcccagtgctctaggccccttgggactctacattatttttccctcctatacactaaagagcccggtgaactgttactgtacagatagatcaaggacaaggtaatctgtcgggaagagaataaagtaggatatcagatcataagctggacactgtcagaaaccctgaacttggtcatacaagccctcatgaaacttcatgcgtgaccccggagaatggtgtacacggatcggggtacttgtgccttccttcctgggcctttcctaggttttgttttgttttgttttgttttgttttctcacacattggctttctgtcaggcagtttcaggattgttctaatcacttacccaagactcactaaagctctgctcttcctggtagtatttgaggcgtttgtatattttgttactgtgaacgatcatgggattcaatgtctcaggcaagctgtgttttttagttttccatattgctatgcttaatattaaatatttatactgcaagttctcttcctcttcctcctatccctcctctgcttcctactgctcctaccttcccactccctccccttctccctttccctctctccccgcctccttcttctcatcatccttatttcctcttttttcttctactttgagacagggtctcactacgtatcattgcctcatcctcctaaaagctgggattacagtctgtgcttctacaagcagattatgaacccccttttctgtattttggggtattatcttaccagagtagacagtggagctagatcacttagtcaaatcatccccactttggggcatgttaaaataaagtactatataccttccctacaacacacacagcaccgtcacatctccttttgtccttgaacacattttttttttgacccgtggctttgagtaactagaacttaaaaggaaaggcttgtggttagatagggtttgaaacgaggtcttgtggtctagttacttggttcaatgaaatctggggaggccctgggaaaactgaactgcgtgttataaagtagcaagatgctagagcgggaaccaaggacacagaatgcccatttatgcagtgaggatgttggcttccccacaaaggacagaatttatgcctaggaaggagctgattaagcaagcagtcccaggctggcagtcctggggattcagtcatcctgcagtatgccccctttctcatggctccccgcaactgccagttccttggttcgctcaacagaaaggattgagccccaggtacaaacatggtgtcaggagttggcgacacccagagaaacagtagaatttttatacccaccagaacttctagaccacttaggaaaagttcgcttttgagtatacatttgatgtaagacacggaaagtagcaccatcccctctctgcctaccctgtcccctgacctccccactggctgggtcctctggggcagcctcccgtattactgtggctctctttctgtttggaataaagctgtaaatcacaatccatatttctttcttctatctatatgatgaaggggacttttattttaaataacaggggtgggggtgaggtaggcgggttttaaagtgtattctccagccacccactttctagtttccatagataatcctcctcccagtgtcatagattatttatcatcattttaccaattataatcattgtaaaattccaggttggtgcctgagtctgggtaaacagttttggtacatataccagtcattttcatattatgccgggagctcactgcaactcccgggccttgacgtgtaattgactttacagccaagattctttaaggctgtgcagccagaggagaaatgagatgggaggagtctgtgaggacgtgtgggaaggaattcactggagttaccctatacctgtttccccagtagggagcatgcagtacgggtgatatacctgcccggggaagccattagaaattcagtatcctttgctttactgggcgctggtcatccatagagctcatctgaatgccagactcccagcaggaacttagtgctcatctgaatgccagactcccggcaggaactcagtgcttggactcccggcaggaacttagtgctcatctgaatgccagactccctgcaggaactcagtgcttggactcccggcaggaacttagtgctcatctgaatgccagactcccggcaggaactcagtgcttgtccacaatctcctggcttgcacagtggagccactcactgtcgtatcagtgggaggagtgtgtcgatacttacaaccttacccactggcctcgctgaagacagcttactccagcttgccatgtgaccttgtctccacacactgcagatgatcccgggcagctgagtggaccatttcctcctgttggcgagccaacaagtgttcaaagataacttcaatacagaaatgtgttctgagatgagtgtaggaggggcagcatgtaccaatgggaccagctctttactgcctgtcttcctgtttcaggatactgatgtgcatagagagtttccagggagtgggtagactgaggagtagaccggagcatgctattcttgtggagtctgcttggtgggattgcaaaaattcatgggattgcaaagaacagcaatctaaggggaaaccacttattctccatggcttcacaagaagctaagagtgtgatgtcaccgatccagttcatgtgattgaggccactgatcacgtttagaaaggaatagagggaagtctcctacatagacagtagcacgcctttaatttcagcacttgggaggcagagacggatggggtcgaggttagacaaattaatccctctgtgtttgaggctagcctggtctacagagtgagttccaggctagccaggacaacatattaagatcctatctcaaaaaaaaaaaaaacaatgaataaataaataagagagggcaattctttcttatttactaaaccttgtgtttatcaatggtgacaattgcatcttttaagcaatttgaacttcaaggtttttgtaaaaactgtttaatcagcctcaaaaggctttttccaccctacaaataagttgccctcttctttcagtctcttgcccagatgcagttgccactgataacacagaatatagtcactgttttccaggccgggcttcactgaggtgacttattttaatttcagtgctaaaatgtgaggagaagttctcgaatacagtcagtgtgtttacctaggaaacagccaatctgcctgtaactgttgctgtcccagtcaagggctggggtgatggctcgctgggtaaaaatgcttggtgtgtgttctagtcctgattcaccaccgctgtgatgaaacaatgactaaaaacaccttggggacgaaagggtttatttcacttaacatccacattgctcttcctcattgaaggaagtcaggctaggaactccaacaggaatgctacacatgtgtgacatggtatccatgcattccatcccccattacacacacacacacacacacatgcacaggcacacatacctacatgcacacacaggcacagatgaacatcatcagaagaagaattgcctctggactcaagcagtcaggatccatgctaatcattgtgattcacattcataagcctagcaacaaaggaatgctgaggcaggagattttattttgtgtgtgagttcagtatcagcctgagcagtgtagcctaggcctgtctcaaaaataaagtcagtcaccatacagtctcttatattccaagaagaaactatgaatgcataaaaatccctcattagcatctcaagactcaagctttattttttaattagatattttctttatttacatttcaaatgttgtcccctttcctagtttcccctctgaaaatcccctattcccccccccttccccaacccatccactattgcttcctgtccctggcattcccctatactggggcatagaaccttcacaggaccaagggcctctcctcccattgaatagctgagtagtactccattgtgtaaatgtaccacattttctgtatccattcctctgttgagggacaaacatgcttaatcatcagggaaatgcaaatcaaaacaaccctgagattccacctcataccagtcagaatggctaagatcaaaaactcaggtgacaacagatgctggcgaggatgtggagaaagaggaacactcctccattgctggtgggactgcaagctggtacaaccactctggaaatcagtctggcggttcctcataaaattggacatagtactaccagaggatccaggaatacctctcctgggtatatatccagaagatgttccaacttataataaggacacatgctccactattcatagcaaccttatttataatagtcaagctttgtttttgtttacgttctaagcgaaccatttctattcatcagggctgctaaagacttattgtcacggattcagaaaaggtttcagaagcctcaggaaaagttgaaggcattgaaggaggccaacagcctcctttccaaccacagtgaaaaactgcaggctgctgaggagctccttaaggaagctggaagcaagacccaggagagcaacctcctgctgctccttgtcaaggccaacctgaaagaattccaggtgagtctcagtgtctccttctccgttaggagttgcaactacaccggcctgtttgtagatagcaccaactttagctcctaacaaagtgagcctggctactggcttacaggtgacgctcagagccaaaatcgggtgctgactttctttcatgatatatcctcaattggtgattttttgatgcaggagaaaaagctgcgtgttcaagaagaacaaaatgtgacctcagagctcattgccaagggtagagaatgggtggatgctgccgggactcacacagctgctgcacaagacaccctaacagtaagttccaatttggacagcccttgccattgccagagcagccacagacctcgccaacgggtgcgcgcacacttgtagctaaacagtcacatgtgtctgttgtaatctctccacgcagcagctggagcatcaccgagatgaactccttctgtgggccagaaaaatcaggagccacgtagatgacctcgtcatgcagatgtccaaacgaagagcccgtgacctggtccacagggcagagcagcatgcctctgagctgcagagcagggcaggagctttggacaggtaaaactgctacacagtattcatagtccaggaagcgtttgctggccctcatcccaagggtgagggtggccattttggttcgtgctgaatcatttttatgctggttttgcatgcacgcccccgcatgcacactcctgtgtgcctgtgcttgagtacacacacacacacacacacacacacacacacacacacgtagacgcatgtgtatttaagtggatatgcatgtaaaagccataggacaaactttgatattgatcctcaggtgtggtgcacatattttaaaacaatctcttgctgaccaggaattcaccatgtaggctaggcttgctggctaaagagccctgtctgtcataggctaggctagctgacttgagagccctgtctgtcataggctaggctagctgacttgaaagccctgtctgtcttagtctccccagcactgggatgacaagccaccaagcttggattttttttctttccccgcatagcatctgtattagttagggttttactgctgtgaacagacaccatgaccatggcaagtcttataaaaaaacaacatttacttggggctggcttacaggtgcagtacattaccatcaaggtgggagcatggcagcatccaggcaggcatggtgcaggaggagctgagagatctatgtcttcatccaaaggctgctagtggaagactgacttccaggcaactaggatgagagtcttaagcccacacccacagtgacacacctattccaatcaggccacacctccagatggtgccactccctggtcccagaatatacaaaccatcacagcgtctgaggaatagaagcaagatactcatgctttaaagcatggtttttgctggctgagccttttctcccgtgaacctttattccatcatgtaaaaccgagactcctatttcacttgtgtggcaagtcagtttccctcctgtgtctgccagctttctttaccataggcatatatgcataataggaaaatacaaatagaatactatgctaccatacaaggctatcacagcttgggcacacctatggtgcccaagtgctctgcacatgagctgtatgaggatgctgtgttctctatagttcttgtgttcttggaatccatggtttaaatggaggatgcggatgcacacactctgcctgtagaagtctctttgccagtgctaaaagttatcacatccaatcatgtctgttgcctgctggtgcaaatgtgtgtgtgtgtgtgtgtgtgtgtgtgtgtgtgtgtgtgtgtgtgtgtgttacagttaccaaccaagggccgaatgtacaccaggccgtcactctaacattgaactgtattcataatcctctttcttctttttatcatgagacaaggtctcactaaaatgcttaggctggcctcgaactcactgtgtagcccagactagctctgaatttgtgatcctccttattgagcctcttggtctaggctagcaggtggatttgtttctttaaactttgttttaaggatggatgcaaaaagttcaagtggggtaggaacgtttgaaaatgggaaactacgcctcattgagaaagtgtcatgagtttatacagccaacgggattttaaaacaaaaaacaaaaaacaaaaacaaaaacaaaattcaatagattatcaaggaaggtaggtactggaatgaatggctgtgagtaccatgccaaccagtggcagaaagtggagcagggcctcagcttctatcttttcccatcattcctaaaagagaggatacgtgggctctacccacagctagactaaaaccttgtttagtatagagtagtgaaagcaatttgagtatgatagtcagatagtgttatttttaatttatcaaaaattaaatcattgagtttcccagtcagatagcaacagacaatgattgctggtttctagtgtgagaatcgaccaattcaataaagttggagagaaaatgaagtgattccctcagcaggcaaagatgtgtcaacagtcacatttcattatccttatagagctagtgagattgcacccttgccagatggcaaactcataaactatgtgcctgctagttagaataaagctcaactgaaatatttcctgactctcctgcaggtggatctcatcaaattggggtatggcctttaggggccaacccatcacccctgcatgtggtcagaaagccttttggaaataaacaagtaggttaccggagagagtataaccaatacacacatgcggtggtacctcaacactaactgggaacttaaacatggattagagagggaaggacagatagtagggattggtggcatggctctctataggaagtggccatcatgggtctcaatgttaattaaaaacctttctgagtagtgttgacatgagaggcagatttctagtcataacctatgtgtgtagagaggaaaccatgacttgctggtcctggattcttttctaagaagaaagaaactagaagactttcagggttagtagagatctactctacccatgaatgtgtccactaatcgtttcttgaaataacatctctaaataatgttgattccatagagaccttgaaaatgttagaaacgtgtctttgaatgccaccagtgcggcacacgtccacagcaacatccagacactgacagaggaagctgagatgctggctgctgatgctcacaagacggcgaataagacagacttggtgagcaatatctggccttcactgcacatcttccttttctgtacaccatgggaggtttttctggaacaaaattcttaacctgtttgaacaagcctcaaggttcaaatgactctttcacgggggtcacctaagcccatcataaaacatagaaatttacattatcattctttagcagtaataaaattatagttatgaagtagcaatgaaaataattttatggttggggtcatcataacatgaagaactgtattaaagggtcccaacattaggaaggttgagaagctctgctctagaaagtttttgagcatacactcggtggctctaatatatatttttccacattcttttctggtgaaatccatctgtgatttgtttttgtttttgtttttgttttgttttgttttaacatatcatatggcccttagttcttaaataattttgagagtacaggtctcactatgctgtacagtatggtcttaaattcctcatttgcagtcaagtgagccctgacctggacttgtgggtagttagaaatgcattgtaccacgcattctacatttttggtcatttctacttctttgtgaagactaatgactactactaaaacaaggggaaatctccttttcctgagatgcggatgctcatgctgtcccaataatacttggcatctctttttgctcacagctgtgtaacgactgattcctctccttctacatgtaaaaaattctctgtgctcttcctctcagacagtgaccttggcctccggctctgaggttggctttcttacttggagcttggttgatgcccttttgatggggctgctctctctgggagggaagtccctgtgcctgaaccattctgtttttcagatctccgaatccctggcttctcgggggaaagcagtccttcagcgctcgtcccggtttctaaaggaaagtgtcagtaccaggaggaagcagcaaggtcagtttgtgtctggatgtatgggatgactgcccacacggtgacaactctgggagaacactctctttcttggagcaatttgaagcttcccgtgtctatctccttaacactgtaatttcatgcctctcaattgaacatcatgggattccgaatcgtgggatggtacggcttactcaaatatgtacgcttctctgtagtcaagccttctttatgaccagctcccagggatgacttgagtcagcattgccgtcagtcttcctggtgtgtgtggggtcatagagtacaggggctcctttttcccccaaacttccctgttcctgttgaaataagttatatctgatggcctctttgcatttttcacctggctagaactatgataggctctcactagaatgtcactggattaaatcataaatgacaaatctttttccataaacacctatgcagttcaaaagtttcagcacgcaattctctgagactgtaagagctatattaataggcataacgtaaaatggcaagactctgttctgtaagagaaaatgcgcaggcatggaattttcctaatgtataatatgtttctcacattgatgcagtttgtaagtgaaccctcttatagctccatgacttaagggctagactttccccgaagctgtccgaagcaagggttaggccagggcattgttttctttgtttctctgtgagtaagacagcttagaacctcccctgtcctttcaatgttagatcttcacaattattgctcactaactcacaagtgctgacaggcacaggtgtgagtttgcacaagtaaaggtccttctagcttattacactgtaaatttcttgccagttaaaattccatattctgatcatgcgctcagatcagaatactaaatgtggcttcatactgtgaacagaaactgtaaaaggtttggtccaactgtgtaaattaaaggaagctgggatgagtccagattcagggaagggaatagagaattgctgattggccagagtgacaggccaggggtcacgaagagccagagcaccatcaggacttgagcgccttgaagtggcaagttccagcatggttgaaactcaccatccgacagaggacagttcaattgtgtcttcttcttcttgcttttgtaaatttaggtatggcattcaggaacaagtaatagtgatacagacaatagccaaatagacaaaatgatctacaaaccaactcccccacccctgccatgtctgtgatgaacagtgctaagaattgctaggaaaactctcaaggatgaggtgtctgcaggaagctagatgtcctgtggatagctgacgtatggtaaagctgtgcctaagcagcgtcctagcaggctgatctgatatgaacccttcctttctccctcacgtaggcattacgatgaagctggatgagttgaaaaacttaacaagtcaatttcaggagagcatggataacattatgaagcaggccaacgactcccttgcgatgcttagagaaagccctggaggtaagcagagaggaggtttctggcctgcttaccttctcgctgagaaagcatctcacaggagcaggaggaagtcctgcctcgcggcttattggggactgtggctggagaactagatcaaggttgattaagcctcaacatggagagggatgcgatttagaggtgaaggtcataaaactatttaaagccagtgtataagtcaagtcatactcttaaaggtgctatgattatgcttttaaaagagaagtgacttttggccaacacttttaattgctgaatttcaagatggctttgacgcagcccagaagagagaggggccttccaaggaggccaagtgtagagaaaagagaatgttcttggccagctgtggagggagtgctagactcactcactgtgaacatggcaaattagagagttcttattgtgtgatcttcctctctcagatgaaggaacgctataaaatcggctcattgattgctaatattaatgatttggaaacacaggttctccacggctttaaatgagtcttgagtcacaaccccagtgaatagggctgttgagcgctatgcgcctgactccagacaacctgtggtgagtcaggactcaccgcactgctcttctatctggaactttcttttccccttctgagcactcacaggaaaatgacccttcatctactttagtaaaacacatcaacattccttatgcaaacttacagaaaagttaagacaaggtcaaaggactgcatgggagttttcacctttattgcctgggggtcttaccatgtagcccaggctagcatcaacctcatggtggtgttgttgtgcctaggctagtgtcaaccccatgatggtgttgtgcccgcttcctgattggaattgcaggcacatgccaccatgcctggcttgagagcgatacacttttatatggctttcatcaagaatggatattttgctgtgtgtactgaaacattctctgggcgtaacaacgccatgtagacatcctcaaccaagggttctcagatagcagaattattcttccccttgtggccgtgtcctctctgagctcttgtcccttatagcagccagtccaccttgtgactaaataccgctttgtcctcccgtggccactcttctcttgattgcaagcttaagttccagaaccttcttatccagacagtaagtgatgtggaggagaacatgtttccagaacatgagcaggacctagagaaagggctaaatagaggagtttggggctggagagatggttagaagtaccgttgcttagcctagagatgtgagttccatctctggacccacagagtggaagggggaaacctctcccaccagttgtcctctgacctccttaggtgtagcctatatggacacacatgcacacactaaataaataaaaatttacaactactgtcacctcatcatccccagaacatactaagggcatggccattaaccatggcctttgtagtcacattgtatagcttatatcatgttccagagaagtaagtatccaaatcattcattggtttttttttttaaaggggtggtagaacatgtgacatacagactcctctgacatgaaaaggcaagaagcctcgttttgtattcaacatatgtgttcctccataaagtgacacacataatttaggctttctcagtgccttcagcaggcgcacacttgcccattcctttatcgtaggtatgagagagaagggcaggaaagccagagagctggcggcagcagccaacgagagtgcggtgaagacactggaggatgtgctggctttgagcctgagggtcttcaatacatcagaggacctgtccagagtgaatgccacagtccaggagacaaacgaccttctgcataactccacgatgaccagtatgtctgtggtcctgctccctgttttgaaagcctgcagcttgctgattgggagagagctgggtacacaaggatgcacagttctagcctagagattcacatttgagaaggagaggggggcctcagggaatgcaagctgtccatgtgttcttcacatatctcagggtttgctcactctgttctatcttatcccatgtcgtagtaacgaacacacttccttttcactcgtttccacctaactcttgccaacccctgccccctcatctccgttagctctgttggctggaagaaaaatgaaagacatggaaatgcaagccaaccttttattggatcgattgaaacctttgaaaaccctggaggagaacctgagcagaaacctgtcggagatcaagctgctgatcagccgggcccggaaacaagtggcgtcggtgagtccggctggggggctccaaaggcttgggcccctgctcacaggtcctggagaagccagttagcacgatgctcggccaccccaactcccctgcaacttctacgggcgcagatctcataacccatgtcctcttaggttcgtctcgggacatttaaaccatgtttcttggaatcctactcacttgaagagtatttcaaagtttcttaggaaaagtgctctcctttctgggactcctagttaatgcctgactccacaactcagcctttgtgccaggaagacattaagtctagtggtaacacctggtaacgtttcttcattttactgattaacctctaatactggggatactctccagaacgggtaggatgggccttgtcctctgggactctgagaaaagaatgtctatccatacagatggcgtgcaagtctacattactacgtgtgtacagtaccagagaggtcaaagctggggaatcggtttttaactacccatggatcagttcactcatttcaaaccatagtaagactatccccaagagagttgccacagtatggggccctagagataaaaagagtgtaaccccctgatctcagcttggtctttctgaagccttttaggcaaggtaaagacactctgggctctcccttctagagccttcccttctagaagaggacttaggctcacgtgggctccagcttccctctctttcatagacaggccaagggaacatctgctaacgttgtagttctaaataccatggctaatacaaacttagaagagaagttaatagaaaaatctatacacaggtaattatgaagcagagcaatatatagtaaataaccgctcaatagctatttcttgagtgatatagtaaatctattacccctgcatttttattgaataaagatcattcaatgctccctgtcggccaggtggtaagaggccacagtaacaaggtatccaatcttaatgtgatgagaccgtttcctgtataaaagagcccagggagagccataaagggctggagagattgctcagctgttaaaagtacttactgttctgtggaagaccagagttaagaacccagcactcaggtagggtagctggtaactgcctgcaacccagctccaggtggtccgatgccctcttatggcctgtgggtactcctgcactgacatgcacacacacacacacacacacacacacacacacacacacacctccaaacccaaaattcaatgaagtaaaccttaacaaaacaaaaaccaagaaaacctaattttttttcatagtaacacacacctataatgccaggctgaggtaatgaagatcatgagtttcaattcaggctcatcctggtctacatagtgataccctgtctctaaataagcaaatagaacatagcctaattgaaaggactggatgtccagtatcgaaacgatttgcctaaataaaagaatctccatcctggtctgctgcctctctctgaagctcagagcattactagttctgcacagaggaaactcttcacagggcgagtgggctggcatctccgatgtcccggggagctgcccccatgtgtcattaagtcaccgggatgctgttttctccctgtcagatcaaagtcgccgtgtctgcagacagagactgcatccgcgcctatcagcctcagacttcatctaccaattacaacaccttgatcctgaacgtgaagacgcaggagcccgacaacctcctcttctacctcggcagcagcagcagtgtaagtgtttgggaattcaggcgtttcctctgcgggactccccactgatgaaagtgtagacatgactgtcctggattcgctaaattctatcagggaaaaaaaacctttgctacaattgtaatgttgaatgttgtagaaatatttaaatctcagcccaagatttctaccctgccttaagctatttaagtccctggatgaaagacacacacaacctttatatttacaataaaccctcaacaacacaagagctgggcagatacgactctctaagttgttagactctgtttcctatcggtaactcccaagttattactatgttgatctgggctgctcttatctccgattgggcagccctcagagccactttctcttgactcctaacccatggcagcttctctttcctcctctcctgcacttctcgtccttcatggtcccctttaacccccaagcccatgaaacctaaaccccacctatgtctcttttgctagaggctgttggcatctttatttaccaatcagaaataggttggggccatggtgtacatgcagactcatctctgggaccgccaggtcttgggaaacctgcttttagcaccacaatagagagcatgagaccaaacctcaatggttggtcgaatgttaaataaacgcaaaagtagctgcctggggtttggttagaccggtcagagggtgactgtttgcctacaagcctgagaatctgagctcaattcataggaaccacttaaacaaagcctgagcatcattgcctgcctttctgtatccagagctggacaggtagatgtaggcagatctctggagcttgtgggccagcctagcctaactaggtgagttccaggtcagtcaaaggccctgcttcaaaaggtagattgttgtcccatatatgccctggcaatgaaaacacgactcaattaatatgaatatatgctatgcgcctagattgaacagatctaccactacactaccatcttctccatctatgagaccccttagaaacttgcagtttctccaggccatgtgcttctgctctgcttttcttcttcttcctcctcttctgcgtcctctccctctttcattttctccttctccctctcttacttctgctccaccaaccctttcatctgcccaatcatcagctctcctttattttacaaattaaggtgggaagcaggtttacaggaaatcacctaagtgctgactcattccttgttcgcagccactcactggagaatggaattaatatcatatataattagccccagagctctccacaacaggagatagcacctaggatacctggggctgtcttctggcctccttgtgaacttgtggtgctaatatgcatactagtaaactcatagacactcataggaacatgcacatggtgaaaggcacaaggcagaaagtaacatttctgaccagtgtccccatctgccatctaattagtgtaccacgggtgcatcatgccttggtggactcagggcgattttcagatagccaggcatcactcaggttcttcctgccaaggcatggcctatggtccccagacgacaggcttcctagacaagactaccactcctttggctctatcagaagagactcaagccctgggaatgttatagaggagaagatgttaagatgcacaggtgtcttctgaggagacaaggagacaagctcactttgtagctcttaagtatgcattccacatccattggcgtcttctgaagcagaaacaagccagtaccttacctagccttgctggggacttggtgacaacccctttgagcttttcccaggagcttcataatagtgaatgatctatctgcaaaactaatgtcagggctgccctctgccacagggtctccatgccctccaaccccagggctgtggttactcatagacagaagagcacagaatttttgtgctgactgtgtaaatagcaatatgtaacttattccccttatcttttcacccagtctgactttctcgcagtggagatgcggcgggggaaggtcgcctttctctgggacctgggctccgggtccacaaggttggaattcccagaggtctccatcaataacaacagatggcacagcatctacataaccaggtagcagaggctgtccccagcatctctcttctgtcaattataccttaccatgtgtcagcaatgaatttaatagacaggcatggagtcattaggaaagttggattgtgaacaaacaatactggatttatattaactataggaataaatcatttaaattatagaacaaatatttttgtctggctgaaagcaagggtcaaaaattgtatattttagattacttttaatatttattttgtatgtatgagtatttgcctgcataagtgtgtatgcaccatgactatgcagtgccctcagccagatgagagcattggaccctcagggactgtactcacaggaggttgtgagccaccatgtgcaagaacagatagtattcttaaccacagagccatctctccaagcccctagattattttttcaaaaaatgttcttagaaagtccaagtgaccagccttgtaaaatggctccgtccacagaagagaggattttgtgaaagacatcagaaagggagatggaaaatgtattttgtgagttcaggcatttccacccactgcctaactcccaaacaaacctggaggcatatttatttatgaataaatgctgtggccataaactttagcttattccctgactagcttataacttacaaagccaatttaaactcttctgtgttttccacaagactaattactacctctcctccattttatgagtctgacttcctcagagtccggggcgaatctcccgcctctgactatgtcccagagttcccgttgctccctgcaggatgtcccacctcctagtcctacctcagctcattggccacaggggtttgattaacaagtgatgtttccatgcagtgcacaaaaccatcccccagtaatattgcctcaaaattcaaatactaagtcaagttgttcctattaaagcccttccaagaagtaaattcgtttaagcagtcttagcaggattttccttttccttttctgtaatatggtggggctttgttgatgatgttggcaatattggtattatattaaaaacagtgtcatgaagaaaggagtaattttttttttagacttggttggactcagtagtgactttcagtataagggagagatgtgatgacctgtctgtttcccgagagctgcttaccaggatttgggggagtaaagtagaggttgaatggctgagggcagaggcaaggcaggtgggtggacatttcaggggtgaccctggagaggtgggtgggctgtgtgtgacaggcaagcttatccatgatgtgatatgtgagtgtgtgtgtgtgtgtgtgtgtgtgtgtgtgtgtatgtgtgtgtgtatgaaattccttctgcaattatttctgacacaaggtttggaaacatggggtccctgagtgtaaaggaagcaagcgctgccgagaacccaccggtcaggacaagcaaatctcctggaccgtcgaaggttctggacataaacaattcaacgctgatgtttgttggagggctcggaggtcagatcaaggtaaagttcttgggcatcctgttcagaaggccatctgaacaggacccctggctgatatgtgctcagtgttaaatataccctgcacaaaatccaaaaattcttgcttttattagttttcatttcagcaggggatcagctgtttttgcaagggtaaacggtcatttttaattacgaagatgaagacaagagtaatcaatggtgctgtttgccacttagacaatcatttcttccagtgatgaagtaggaaattaaatacatctatagtcatttctgtaaagtccctttatctctcttccaattctagtggtaattgtgctaattagtgtatagcaagagggcatagtatttgcataatgacatcacctagttgaactgggttgggaggacagcctgcgtccctctagtctactgaccccttgtctgggctggcgactcactcacagcaaactttccccagaaacggagtggatccttaggggactgtccagagatggctgtggtcattcacacctttaatcccagcatccacgagcctgaagcaagcgaaccgggagtgtgaggctaacttgggctgtatccataaacaagcctctttctcaatccccttccccctcaaggaacagaaacaatgtaaaatgttcaggcttagaagtaattgttgcaaactggccatttcattgaatgttctcttggagtccgaagcactggatttgagctcccagggcagtttagagaatatatgcctgccttcaggcctatgggtgcgcagtatgagtttgtttgtttgtttgtttttttgtctttgtaccagaaatccccggctgtgaaggttactcattttaagggctgcatgggagaggccttcttgaatggcaaatcgattggcctgtggaattacatcgagagagaggggaagtgcaatggctgctttggaaggtagcccgccccacgtttctactttctcttagctctatactccctattctcataaaagactatgaatggactcttggttaccgaagcctttgggctaacactgggtttggagtccaactttcccagtcatctagcaaggcttccttggtgactttggctaattttcccctttccctgaagtttgggtgtctcccagacttctcgtactcaccccgcccttactcctcagggtcagtatgcagtgtgcatgtgcaaaacattataaatctgagtgaaactctgctccagtggtcatcactggtcttccaatgagtccacgtgagcatccgatgagtccacgtgagcatccgagggttgtttccctgacccttgttgcagggagacgcagggcttgcagttggcaagaacagcttttatatgcacagttagtacgtacagcttctgaactctgagacatccccttttgctcacaccgcatgtctaaccaaaaatattcccagaaacttagtaaatctgatatgaaaatagacccaacctctgggctctgctcctccacttaaccaagttaaatggcggatgctggttctccttcactgtggtaaggtcggcctttttgtgtacatccccggtttcattcccagagacacctgccatcctaccagatttccaacccttgcctttgaagcaaaggctgaggaagaagggttgggatgcccctgagctctgtgttcactgagggcctagtcatcccgtgttcattgagagtctaggcatcttgagttcactgagagtctaggcatcctgctgctgagctgaaatcccagctggctataggagcaggtggaatgattggtttagacaacctagggtttaataagtatgtttcactggacaccgaatgaagaaatctcccagccattcttatacttatgttgaccaatatattgaccaagtttcaaataaccctagcttggtaggttattaatacgtgttcttgaaaaagaaaaaaaaaagcaacagtagaggagctgtatttatcatacatgtttgaaaaatgtcaagttcaaatatcaaatatagctaggtatggtagcacatgcctttaatcccagcactcagcagataaaggcaggcagagctctgtgagttctagcctagcaagggttgcatagcgactgtttccatatatagagggaagatagataagtagatagatattgataaatagatataaatgatatagatatagatgatatagaaatagctgttgtgatgtagtcagagctttaagttagtttggaacatgctaatgatgcacagagtacccttacctcaccaatgggctacagctgtagtgtttccaaaatacactgaatctcaagccctttataaaaatgggatcattaggagttccttcatataggacatattttggccagaatgctactttgtgtctgagcttgtaaagtgactatcttcattttagccatgcccatacacacacacacacacacacacacacacacacacacactaacacacacgcagcctattggagcagcctgaagggacacagtgcgctcctacctggtgtcactggctagtgttaggttgtcggtacagcccgtaatactcctcagcttactgattatatttggtttatattgcctagtagacgggttaattccttaatccgtctttttatgtgttgctagatactcttacataatatcagcatttttataattctacttaccgtaatggctgcttgcacaaactctcttagaaagcggctgggctctggtcaacatgggtttgccctgcatgaaaatgccttgtgggatacagcttaaatgtcgtctcctctcctctctgacacatttgggactgggggtggggtgggattttacatttgtattttgggatttgggggtaatggaccatcctggaggtaggattcaaatctagacgcagactcttttttttttttttttttttttttgctttttatcatatataccaaatgcagagcctgagattattccatatattttaaaacatctttttttcatgatgcatatataatttttgccttgtatcatcctgtctgtctgttcagagctgttccaatttcagaatacttaagttttcacaagttcgaggctgcaactttatggctcactatcaagaacggagataggtttctcctacggcctaggatgagagagtacctttgctgctctgcccgccctcctgatcgtgggtggtatttcatggcttctgccttgcagctcccagaacgaagattcctccttccatttcgatggaagcgggtacgccatggtggagaagacgctccggcccaccgtgacgcagatagtaattctcttcagcaccttctccccgaatggccttcttttctacctggcttcaaacggcaccgtgagtttctgcagcacttggccctccgtgtataggaccgttaccttaaggttacctatgtctgctgtgcatttctcttgccagaggcgaacagatgtccctccactacagaaagcacacccacagagcagagtgttgcttccaccacagcgtgctaggagagacaatgaggtttcacttacattcacttacaggtagtgggggtccacttacaggagaatgaaggaggagttagtaacaggagaatggtccccaagaccaatgcaggaccgagaagtctcttcctagcatgggtaatacctccaaaccctgctccacgtcagtccctgtcagtcagtttcgctcttcataaagacctaagtccacaggagctgggagcgtcacctactggagggagcaaaccacagaagcaagtggttggctggagtcttccgtgagcgtttgcatactcgctgatgaacatcaccaacctgattctgttaaagtctctgaggcggtttcaacaagctcttactactgtaatccatacacttaggctgcctaggttctcatttaagtcgctgatcaatgagcacaaattcaggaagaactatcagggaacacacgaaagcagagtagaccctccagtcggcccaggcgtgagtcagacacttcctgttatgctctagttgtataaatactgtgcatttgcttttttaaaaattatttttattattattttgtgtatgtgagtagtttccctgtctgcatgtctatgcaccataagcatgcttagtgcccactgaggccagaagagggttttggatctcctgggactgcagttacagatggttgtgagctgccaggcaggtgctgggaattgaacacagatcctgtgtaagagcagccagtgcccttaaccactaagccatctctccagcccccacagtagcctcatttgaatctcatctacaggaatggtcccccttttgtcttgtattctggccattttcagaaacagctactaataaatttaaataaaaagccctcctagacagtccaattttcctactaacacctggctttggtaacaatgtatatcaattagtttaattctcagtaatattccacaaagccgctgggtacatttttacttatatgtaacagactagctatttgactctaacttttatgtaacaatccctagtttgactttaagagttttctcccatccctaacttgggagggaaaaaaaatctagagataaagacgtatctgcagagaagacttctttcctccacagaaggacttcctatccatcgagctggtccgtggcagggtcaaagtgatggtggacctagggtcaggacccctcactcttatgacagacaggcggtataacaacggaacctggtataaaatcgccttccagcggaaccggaagcaaggtaggtgcacaaggtggacttctatggtattggccgcccctctaagaacaaacagcactccagaacccgtggtgattctgctcagttggccgcccgctgcatcttcatgacattagaacacgtcaccctccacactcggccacagctgcactcttgcatgatatttgattgaaagctacctttgtctatggaacgagaagcaatggggatccgcctattgctggaagaatggtataattccatttgtccagggtttcggtctttcttgttaaacgcaggattggaaagaaatatcggattcattccgttttctttcacacactgttcggcagcgcatgttctgtggctgccaacctttgtctctgaatgacaatgagcaacatcagtcacatttgcaggatttaaaagagcatgccctcataaatgggatgtgttgacagaggtttatgaagtgttaaccgtccctttccccgactcccactaggactgctagctgtcttcgatgcatatgacaccagtgacaaggagacaaagcaaggagagactccaggagccgcttccgacctcaatcggctggagaaagacctgatttacgtgggtggattgcctcattctaaggctgtgaggtatgatgtgaaaccacggggcagtcgtgtggaattcccaggcctctccgactcagtgtgtgaatggtcctcatgtccttacctccaggaaaggggtcagcagcagaagctatgtgggctgtatcaagaacctagagatatccaggtccacctttgatttgctgagaaattcctacggagtgagaaaaggctgcgcactggaggtggggagcaagcttggtcacgggggtctggatgggtttccctaggtatctggtggtttaccgcaataaagctctcagcctgagggtgggcgagatgcaaaggaggcaggccaacctcaccctgccttcccctctctgtcaccagcctatccagagtgtgagtttcctgagaggcggctatgtggagatgccacccaagtctctctcacctgagtcatccctgctggccacattcgccaccaagaacagcagcggaatcctcctggttgccctgggcaaggatgcggaggaggctggtggggctcaggcacatgtggtaagtagctgcaacccacggaagtagagcggggctggagacgtgtgtggggaatttctacctcacgcatttactgtaaagctgcttacaagcggttctataggagcgcctttttaattagtgagtgaaagtcatgactgccaaaggttctgctcatggactcaaggtttcccgagtcacatgatcaatatcccacttctcagggtggatgacaggctgctgccctcagactaaagcagctcctcagggggaggctgggtttccctcaatgtgcaatgcttggggcagagtgagagttcttcccttacattctatggggggggggggagttgttgttgttgagtgtgaagggagaagagagacagacgtggcctgtgacaggtgcccagtggcaggagaaagcagagaagacattttccccacaagagggtgccatgcaatcagataactgaagggaaggttggagaacactagcctgaggtcttgatgaaggagagactgcacacatgcaggtcacagaacaacatgctctgccgatcaagacatggctgtgtgataccatcatgcacactgcatggtggatactgcttcctaaattgtatggggccaaaaaggttcagagaacctgattaaactgtccaagtatctatactgaaaaaaaaaatcagtctcctgcatcatgtagtttcatcagtaacagcatgcatggggatcggcagaaatagaaatctgtgacgggaccacaaggccaacaacagcaggctacaagtgacacagatcggagtggagtccatcaaatccaaaaataccctaactgatggtgactttcctaagcactcgattgccttgcattatcgggtctacatcattcatacaagacggaaaatgttacctacccttcagtaatgtgttgtgttttggaaaatgtatcctttcagcccttcttttccatcatgctgcttgagggacgaattgaagtgcatgtcaactctggggacgggaccagtctgaggaaggccctcctgcatgcccccaccggctcctacagtgatggacaggaacactccatctccctggttaggaatcggaggtacttagctccagggccttgccgagatgagcttgaggaagctccttagcttgtcggacactcagtgtgattgacacctggtgattgacactcggtatgactgacacttggtatggttgacaccccatgtgactgacacccagtgtgactggaatggttggcatggaaggcattgacagtcatagttcttaccatttcaaatgccggcactctaccacagagtcaactctcttgtagtttgtagcgatgtgtttgtgaaattttcatagttgagagccatacctttgccctctatttaagccctatatgaactacttacaaactgggtgaatgtggtggtgaacagcaggctggctttggtgggcagtattgtgcccacagtaaacaccgtcctatcaatgttccctgtatttccatatccaactgtagaccttctgtttgagggatgctgggtgttttcacaacagaaaaaaaaaaaaaacatgtttgagtacacacccttatctcttatactcaatcgagcttagtgatgtattcgtaggttttactctttgatatttgatgttgagcttcaggttcccatgttttggattcacatacaatccatgccaaaatttttctgtaggaaaaaattatcatcccaaaaggaacttgctagaattacatatgaaaatggagctcttctttgtacttaaaaaaaaaaacaacaacttgttttctcctttgatgtggtagagttatcaccatacaagtggatgagaacagtcccgtagaaatgaagttgggtccattaacagaaggaaagacgatcgacatatccaacctgtacatagggggacttccggaggacaaggcgaccccgatgctcaagatgcggacttcgttccatgggtgtattaaaaacgtggtccttgacgctcagtgagtgtgactgtttcccatcctgttcttgcgctttgtcatctgccaatggtgggagatgttctccaggctcagccattataagggaacttccttggcctatcatgactggctctcccaatggatcttttatggtcaacatggcaatcagatctgaccatcaaatagtatttagaaaaaaaaccatcactggctacctttgtgtgtgtagtgtagagtactgagctgggctttgatgcatggtgggcagttactctacccccgaggtacatccccatccttaagtgtacctttacaagaacccaactggattgctaacagctacatcttcttcatggtttctcccgagacagttgctatatggttaaattttgcacgtttccactctctgtgaagaagagaattattatgtgcacagatgttgcttgttcctcctttcccaagctctagtcacattggagtcgtggggaaagtggtgtcagaacctagcgaccagcatctgcctacaggaaatcataacgtggtcagtaggaggagttattgattccatccttgctaggctgctggaggcacttcctgaggacaaggggacttccgatgctccggatgtaacctcgagagatggcaggggtctttcacagtcacagtgacctctgagaagttaccttctcggagtccctgaacagagcaagaggagacctgtggttgcacagactctggtgcaagagcagaaccttactcagatatctgtagatttatatacagtcaccagttgcccatccatccctctactgatgaggcaacttcatgctcctaaaagccacgaggctttggaatgcatagtcaggtatagctttggtagtcgggtatagctttgggaggtgccagtgaggtccaggctgctgtgggattgtggccagagcttcttggtagagagaccagagacaagcacagttcagaacaaagaaccagtattaaatggaaactgctgcccagtggggtggggaaccagagactcgatgacctgagagcccagcctacagcggtgacagtcttgactctggtctaagctcaggaccatccaggttgccagcatcatccaggtttaggggtaccagcatcttccaggtttaggggtgtatgcttattttaatcagaaccaaacagaaagagtggtgtgcccatgtaacttgggcaccgtgaaggatggttggcttggttaccctaagagaaatggatcagtggtttaaaatgggttctaattaccactttaatcaaatgattaggtccccacgctcctccagggccttttcattacagtgctctctcgtttgtctgtagacttttggacttcacccatgcgactggctctgagcaagtagagctggacacatgcttgctggcagaagagcccatgcagagtctgcacagagaacacggggaactccctccggagcccccaactctaccacagcctgtaagcatggcatcccttcagtgggggtcatccaggtctggtcaggagaaagccactggctaggaggagtgaacccaggcagacagattccgagaaagccaaaagtgatccaggaagcaatgggaacgcaggagtcaggacagctgggggagagcatacggaaagagcacacggaaagagtcccaagagggcactggagctgggaaggaggggaaagtacgccagctgtgccctctccctgcctcccagttcctcagctgtccctcccatgggcagactacctgagagtcatttgtctctctggggactgagaagtgactttaaggatctgatcaaccactggagggatagggtggaagctcttgtctgtggatgactcagagttggcaccccaagtggttagtgtaccatgagagttttgatggtttccctaatgcccctgtaatgtgtcagatttaggtgggggaagcgtggaaggaagcatgtccccgagtccctgggtgtgattcagtgttcaagtacgggagtttggtccattgagggaaatctggtcacggcactttattttctccccttccgacttctcagaagatggtgtgtagttattccagtgcagcactgtctctgctgggccccggagttcaagcctgtttcctagttgtaaacccacatagcagactcggcatcctgtgtgagacgatgtggaggcagccaacactgccaaaggccctgccctgtgctcctggcttctggctagggtcctgggcccttcaagcccagtttttatttccatttcctgtacctattatgtgaattgaagggcctgtgagatctgagggcactgttgtctccctgtggtgtcccagctgtggctgccttttagccaccagtgtcctcgggccatcctcatgatcccttaggcccaaggaagtctcatagaggaacccccatctatcatccgagggaaggtgagctggagtaatggtgagaaatggcaggaagctgagattgttctttggggagaaaggcactgaggggttcatagtttaggatagagatccagacgagtcaaaccacagtggtggcagctgctgttccatcacggtggcttctggaacatttcctttatggaagaacatggtagaggtcctggctaccctggctcagggtccctatgcacctcttacaggaactgtgcgcagtagacacggctccggggtatgtggcaggtgctcaccagtttggcctctcgcagaacagccacttggtgctccctctgaatcagtctgatgtccggaagaggtaagccattttcctcaggtcactctgaggttctccttaccagacgatgaggaaagcatggtgctagcttctgaaataagtatatccgctcatatccaacagattcagtggtccacacggacccagacaaggatgccctgtatcccaggcccctaatgatagcatactctgcattgccctaaaacaactgaaggctttcctggtgacctgcatgggagtcttgctcgtttttgtcattcagagctcagctaaaatgtcatagttgttcactttaattacttagtacagtgacccgtgggcctctctgggatgtagcagtgatatggttctagcctcggtttcaaggtttcaggaattccttctcatttttaccatcttagaaagttcccatcagccatctgtgccatgaatgggagcgtgagtgagtgaacacctcctctctctggagactgtgaggctggtgtacgataaagcagcagtgggttctctctctcgtggaggtcaccttaagcactggaagctgaccttcccggtcaccggtgttgagtccctgtcctccctcaggctccaggtgcagctgagcattcggacatttgcctccagtggcctcatttactatgtggctcatcagaaccaaatggactacgccacgctccagctccaagagggccgcctgcacttcatgtttgatctcggcaagggccggaccaaggtctcccaccctgccctgctcagtgatggcaagtggcacacagtaagttccccggaggccctgtcacctgtcccaaactctctccctgcatctgtggtggtaattccattttcttgatgggaatctgtgccttttggcccttcattgtcgctaggtttgacatctcccacaaatggtgtacgcatcgtctcagcagggccccattctactccctgaatttctccagacacttgttcagtgttgaacacccaataaacatccaactgctggcgagagaacgaatcagaggtctcaaatcctgttcttgacttggcaagaagccagagtcttagggtttcatttctgtgaaaagacaccatgactgccgatggcaacttgtccaaagaaaccgtttaattgagtctggtttagagtttcagaggtttagtccattatcagcctcaaagcaggaagcattggcactttgtaggcagacatggtgctgaagaaggagctgagagttctacatcttgatgcacaggcagcaggggtaagactgtcacactagacctagcttgagcatatgagtcctcaaagcccacctccacagtaacacacttcccctaagaaggacacgccccctccaagaaggacacacctcctccaaggaggacacacctcctccaaggaggacacacctcctaatagggctactccctatttaaacacatgagtttatgggggacatccctcttcaaaccaccccaaccagtgacctgaaagaactgtgctgctcatcgaagcgcctgctgataaccagggctcggaagctctgcggtagagtctccccatctcctaccagcctcaatctagtctttgccacagcaggccacgggcagagccatccgccagggtttggtctgagctctcaccgatcttaaggaacacacgtccctaagcagacttccgttaaagctttctcgcatgatttgcaaattctgggtgttttcatttcccgtaggtcaagacagaatacattaaaaggaaggcgttcatgactgttgacggccaagagtcccccagtgtgactgtggtgggcaatgcaaccacgctggatgtggaaaggaaactgtacctcggaggccttcccagccactacagggccaggaacatcgggactgtaagcagaggcttgtgggttggtggaggaccattatgttccagtgctcttgttcccctgccccaatcgacttggggggaagcccagcaaatctgtatgtgcacattagtgagagaagctctttaaatgcaagcagtgttttagcaagaaatgaagaaaacacttccagggcattatcactaaaggaccggattgagagagcaaagggggtggggggtgttcacatgaggaattgccactgttaaactttagaaagcaagacgctgtcataatgtgtgctattgagggaggcttaatgaagcacaagaaaactacattctatctcatcatcagctccacctactctcttgtctccattgctttagatcacccacagcatccctgcctgcattggggaaatcatggttaatggccaacagctggataaagacaggcccttgtctgcctctgctgtggacaggtgctatgtcgtggctcaggaaggaactttctttgaaggaagcggatatgcagctcttggtatgtgctgttagctgcctgaaggaactccttgggtttagtgtgttctctgaaatgatgtggatccatctctgataggatgagaccccgctagagaggctgcctaaggccatgtttgtttacttggtgttctggtctgtgcctaactgttcatgcaaagcctgcaccaaaaagggcacattccctgtctaggttaataaagacccttgaattgaaaggcaggcatgcacgcctgttattccaatgctcggaaggctgaggcaggaggatcccaaattgtatatcaatctgaatgataataatgatagcatgtctttaaaaataagaacacgaaatactaagaagaatcagggctctggtaggagacgaggtagggagcccgaatgcaatgcgctgatcagattgtcttttagccccagccatggtaacaactgctctctagtgccaatattcatccaacggtcatgatgccctccaagatacacattaattaagaaggctaacagggagagactatcaagctggatgtatctagggcccaagggatcagatgcaggtgaaggaagtccctgaccaccctctgttctggttcatgaccgagtaacttcttcaaaggcggtctttttatctgggcttgttcatgcacgcctgcaatttcagcactcaggtggcagaggcaggaggattgcaaagctggtggcggtctggtgacatagcaaggttctatcttagaagaaaaacaaaaactaagtgtttcttcttatgagcactgaagtctgagggatgggtggggatacagctgacccagatcttgaacttggccagaaccatgaaggcttgcccagcccagcactgtccagcctgtgggttctcaccataacagtgctaccttgtgtttttcagtcaaggaaggttacaaagttcgattggatttaaatatcacactggagttccgtactacctctaagaatggcgtcctcctgggaatcagcagtgccaaagtggatgccattggcctagagattgtagatggcaaggtaggtggtccacctgcaagccctgcctaccctaccagaggcagagcagaaattgcttagattcaagtttcttattatccacttcattaatggaaaaaagagaattttccattagtattttaaaataaggcctaaaaagctatgttcagagtaacttcttttcatacatttgagttaatatagcatttctgactgcactttaccagaagcaatatgcccgtattatgccctgtctcttctaataagttttaactattcacttgcaaataagcagagtcccatagatttgcagtgaaatgaacacgcatgtccccacccccaggcttctcataatcaggtcaggcttagcccacactgaatccccaagggacagtgtcacaacccccaggaagccataagatggactacgtgtgcacccacctatgtgcatagcttgtgatatgcaaatgaaaccatcactgccatcaagatccatagcaaccatggcattaccactagactcttcccgaggtgctccttggtaaccacaggccccagaccctgccttccttgcccttggcaaccattgatctgcctctactgccttgcgggagagaattgggcgtgtatgctatgctacccttaagccacagaaaccatggatgctggagtcttggggtgccctctcctgcaatatgcttggccaccatgagtgagatgctggaatcttccttttggaaggcaagggatatggtccctctcggattcacatgctaaagtgctccccactagcatctctcagagtctggtgtttaaagaggccattgggagctagtgagatggctttctgagcataaatgcctgcctgatgttaatattaatgacatcagttcagtctccaggacccacagggacagaaggaaagaaaaaacaaaaaaacaaaaaccaattccagcattgacttctgtgtgctcagacatgggcacatgcacaagcccacacaataaatatgtgtgaatcaaaagtaactcagttaaaacgagatcattaagtgggctctgagccagtgtgactgtgaccagcaggacacacacacacaggagaccaggcacagagaaggctccttgcatgctccatgcattcatttacttgcttggattgcgtatttttccttttcggttcttggccctttaggattgcctatggtggggtcaggggagactggcaaaattccccttgccttgtccttcacctctcctcttcccgcctcaattaaaaaacaaaaaacaaaaaacaaacaaacaaataaaaccctaccttcatgacagattgctgcctcaatgctgtggtgtagagccaacttttcttctcatcctatacttaaatataattttttataaatttatatattttttgaaaacctaacatctatttacaagtttttgcatgatatctaaaaagaaaaaaattatcagaagtgtaaaagctatgaaaaatgtaattttctgttgttctctgtattttactttttttgttttgttgttgtgttctatatattacttcttactctcttgcaactttatttagtgttctttccaaagctctgcaatatacatctttagtgtgtcacacacacagtgtgctctgaaatagtagtggtcttgtaggtatctggtccaaaagaaacttggggcaaatgctaaccatggtgcctactggtgtaccaaaacacacattggcgcccatactcactcagtacctgtggctcccctcagctcttctcagcccactactatcctaaacttctccagcccttgggctttgcttcctccagcttctggttcctatatgactctgtcattatggccctgtgtccacactctctctccccagtttggtctactggtcatatttagtctatgctttctctgcccactctggactctcccagatgcctccggctatactcttcccatcagccataccttggagctatgttctcagctttccacagtaggcagtgtgggaaacttagaacagcaggcttgaaactctcacctccctcagttatcagaaccacataatggtggagctttaaacccaaaacttgacttgcccagctctggaggctagaagtgtaaggcttggcagggttggcctctcctgaggccccgctccttggcctgtacatggctatcttctcctcacattgacttttctctgggtgcctgtgccctgatgactctgataagcacacagattaaagttcaccatagtgacctccttttaacctaacaacctccttaaggtccccattatctgaatatcatcatattctgacagatgttaggggttagacctcaagtgtgtggacagcttttggagtgacaccatttagcccagaacccctctctgccctttgcaaagccctggctttttgttcatggctccctgttgtggagcatctgtgcctggtcagggaagttagcaagtgattgtgattggacagtccagtttctggggaaactgcagactcctgaaaatgtcctgaagtgccctgagaatggagcactgattttggaactgtggggggctggatggagtcccagtgttttaggaggtgatcctccactgtcgttgtttgtcacggtcattgctccttgtttccagaatcctatgtagtcctctgctctgagaacaattcatgaatgtgctgtgctccatggcttcttggccttctggctgagatccagtggggggggggggggaaaggcagtggtcctaaatgtagagaactcacccaggcatttgcatcgtccaggtcttatttcacgtcaacaacggtgccggaaggataacagccacctaccagcccagagccgccagagctctctgtgatggcaagtggcacacactccaagcccacaaaagcaagcaccgcatcgtcctgactgtggacgggaattccgttagggctgaaagcccccacacccattccacctcggcagacaccaacgatcccatttatgtgggtggctatcctggtatgtgtgactccctattcggtttatccacaccggaggctcagtcctgtgaaggtgtaaatgcaaaggatcatggggtagggattgaaggatgcataatttaatgacaagtcccactgttttagacaagtggtttgaagtactggacctaaacttttttggggaaatttagcataacccccatcacgtacaagtttctcactgagaacgttggctctgccgtgacataactggataatctcacctctgccctagatgacctcaaggctggagtctaagtcaggcataggctggactcatcctcctgtatcaaatttgcatttgaaatgtcccaagaaattattgcagagcctcaacacctgcttggtgacttttcaagtcccaactaagccctcaagtcactgcctaaaaaaatttagcaggaattctgctatccactaaacccacatgtgttatgatttgagagtcgtttgaggtcatttttgtctcttttaatataccctatctcaacaaaattaagcaacccttgtccctttctccctgaacagcccacatcaaacagaactgcctgagcagccgggcctcattccggggctgtgtgaggaacctcaggctgagcaggggctcacaagtgcagtccttggacctgagccgagcctttgacctacaaggagtcttccctcattcctgccccgggcctgagccctaaactgtcgccagcctctgcccttggaatcatcgccaacgcatggaagagagcagtttgtgaactcaagcagctcagctcccattcccatcccattgccatctcaggttatgtttccagaggaaaatgctgtatttatgttgaactaaagccacacggacaacagatacctctattaaatggtttaaaacgtcagtgg

SEQ ID NO: 86 - DNA, 178519 bp, Pan troglodytes
  misc_feature (37416)..(37702): n is a, c, g, or t
  misc_feature (38146)..(38213): n is a, c, g, or t
  misc_feature (59629)..(59630): n is a, c, g, or t
  misc_feature (59635)..(59635): n is a, c, g, or t
  misc_feature (97170)..(97753): n is a, c, g, or t
  misc_feature (103530)..(103790): n is a, c, g, or t
  misc_feature (108794)..(108995): n is a, c, g, or t
  misc_feature (111337)..(111346): n is a, c, g, or t
tccaggagcggcggggccagggcatcgcggactcgagtcccgcggagcgttccaggcgggcgcgcggctttctccccagacccaccgagtggcggcggaggcgagatgcgcgggggcgtgctcctggtcttgctgctgtgtgtcgccgcgcagtgccggcagaaaggtgagcccggcccgggtcctagggtccctgtcccctgcaggcgggcaggcgggggcggccgcggacaaagcccgtcgcgttggggctgctggagtccgggcgcgcatcctgatccacctcggagtgggtgtctcggccacgtgggtctcccgcgcttgccggggagggctggatggggacgccgctcctggcggacgctgcccgctctttgcaggcttaggctttaacctcctcgggctttgggggtcgtccagcctcgcctctggcttttgcgggacttcgcgacccaggagcgccatctacgcgagcagtgctgggggtggcgggagcggggcgcccggagcggggcgccgggggttgcttttagtgccccggctgcgcgggcgggggtggcggggctgttggccgggcgcgggggatgaatggagaaagagctctcccgagtcgccctcattgtccggctgcgcaagctgggtcgccgcggccgggaaagggcggattcctcggggcccctggcagccaagcgggctagtggggagagacgcggcgagaagggcgcccctagccagccgtcccgggcagggggacccgcaggcggcgtccagggcactgatgcgccttcccgacccgcgctttttgtgcggtaggcgaagtggccaaacccgctcattcacgggattgaccgtgggcgcgccggggcgagggaccagcggagaagggagcaccttgcatgcgcgttgcaaggattgagaagagaaactcagagcgaattttcattttctgtttttgcgggcgggcggagagagagagagagagaagaaagaaagagagagagagaaagagaaaagaaagaaagagagagaaagaaagaaaaagaaagaaagaattcttttcccttttgggggacaaccctagtcacccacgccacccctagagctgtcttcgcagcgtggcttcgtgttggctaggcagtcacaaatatttgttgaaaacatcttaatgtatgcagcacatgacaatgggcgtattcccacgaatacaaacttcattaaaaaaaaaaattcgagtcaaaagtagtgggcggaatttgcagtgccctcgtgggaaacgtgtgtttgggcattgtgctgagttgtgagctctgcagaaacgcgaccatctcattcattcaagcattcatgatggaagcactggaccggagctggaaacgcagcattgaatagctgcgagtctgctgcgcagagccaggctgggaagagggaatttacatagttatcagccagaagaaaggagcctttggagagggagaggagccttaaaggattgcgaggggactcctgtctatcaggctgctgaaggtgaacaagtcccggtttcccacagggtagagaaagagcagcttgcctcagcttattgttccccgaaattgaaagtcttagactgaagagatggcctgaaggttgtcctggcccctcggggctcggcacttggcctggcggttatgagtggtttttggagaaagtgggacctcatggggctttcctgctttgagatgctgcggaaaacctcccagggcaggagccctttaatgtttcatatcgcattccctgtttgcctttttgccttccgcaccccaccaaccctcacccttcctaactagcctccttgagcagttttgattttttttttttttttttttttttttgcagtctccgggctgcaggcaggagtggagtggcgccatctcggctcactgcaacctccgcctcccgggttcaaacaattctgcctcagcctcccgagtagctgggactacaggcgcgtgccaccacgcccggctatttttttttttttttttttttttttgtatttttagtggagacagggtttcaccatattggccagggtggtctcaaactcctgacctcgtgatcagcccgcctcggcctcccaaagtgctgggattgcaggcgtgagccgccgcgcccggactgattttttttttttaagaaacgattttgtgccccatgaatagcatgaatgattaataaagtgtgtgttttggtgataatacaataatcctgacctgcaaatcacctgctagttagttgtctggtgttatttttaaaaataacttattatctattgacattcagattgttagacgttccctgtcatttctgcagtctctctgggttaccttacagctcatagtatatgacccgatggctcactttcctttgaaatataatgagtttcaagtgagctcctcctaagtattgaataggaggtattgtgtttgtaaaaataatgtgttaaattcatagctggcaatcacataaaattatgattgcttcatcacttttgttggaaaccatcccttctttttttctaaaatagacaattctaaggacagaaaaaaatctacgagtaaaagaaaattcacttcattctcatatatgacatagtattcaaatttagcaagtatgtgctccacagtaaagtatgcatgcctgaatggatttcagaggtgcgtttttcttttctgtcgctgtattctctaagggcccatgaaaaatattgattgtagcagttggaaacaagggtatgtgtaatagaagcctcactgcccacctcctacatagcctagactttagtccattctttttttccttcttcttttccagacattaaatatgaagcctacatctgtagttaatctagcgtgattgagaattcaaatgcatcaagaatattagaataaatacatatactgatcttcagtgtcttgtgccactgctttataattgcactgctttataaactcatataaaatgtttctgggaccatttatttcagggtaatgatccttgaaacgccctaccgttttatactaattcattcataaaatcctatggatattcattttcgtgtacagtaaattgttatggggaaataacacaagctctatctttaagcttcaggtgtttaattctctggctttactagctatggcaaattggggacataacgtgtattttagtttcactatctgtaaaatgggaataataatagtgcctacctgaaagggatgttaatgattaaatgaaataatgtgagaaaagttgttagaccagtatctagtacagagttaaccctcaacaagcaagtttatttatgttcatcactgttactattttataaagaactatatatttttaaactatattctccaaaatgcataattgtttagaaatttgaagtctggatttggaatcaaatagtcttgggctcaaatgccagacctgtcactttaattagctatggccatggctaagtttcttaacttctctgaatgtcagctttctatctataaaatggatagcattgatacgattaaataatatgtgaaaaatattagcacagtgtagggcatgtcataggtactgagtgcatgatggttattactgttacgcctattgtacttgctcatcatcctggacatcatctctctttcattgctgaaatccatttggtcattgagacttattgattttacctcctgaaaatctgtgcagtctctttcccgtttttttttttttttttttttttctttttttttttttttgagacagagtctcgctctgtcgcccaggctggagtgcagtggcgcgatcttggctcactgcaagctccacctcccaggttcatgccattctcctgcctcagcctcccaagtagctggggctacaggtgcccgccaccacgcccggctaattttttgtattctttagtagagacggggtttcaccgtgttagccaggatggtgtcgatctcatgacctggtgatccacccacctcggcctcccaaagtgttgggattacaggagtgagccactgcacccggcctctttcccattttttattctcactgctggctagacttaggaattgtttgtttttctcaggttgtttgtttttctcaggaaatagtgtgatggttcactcagcaggccagcagcctcacctgttctccctcctcagcagtgccatcactgtgatgtttctagaaacaccatctcgataaccgctcctactcttgtttaaaattcttcccatttctcaccgtttctttatcaaattacttaatgttccccagtgtgacttactttccttcatgtttaagcaagtggtcttcttccaaggtgtgcccttttcactccacatccttctccagggcccaccgtataagtttagattatgtgccccaaacccctcactttataagatgcacaaaatgacagtgtcctgctgtgtcacattgagggtaaagcaaggaggctgggaccccagctggcctactgtctcagagctgagaggcataatctgggatacgtctgcacctatttgtagctaactaatgtttcctggcacatgggctcttaagtgccagacacatctttcatttgggttctaaagaaccctggaaaatcttcccagctctctctctgctgaagtatttgttagacaaccttccctgtactcatagggctttccctgctcaatgctattgtcttgcctgtcatggggccaatgacttatctggctcaccttctctctcggccttgtcaaggtcagggactgttttatgcatatctgttcattgctttgcagtgtttctagcagttagtagccacttcttgttgttgagctaagttgaaatgaacatctttatttaggaatcaagtaactttaaaaatattttgaatagctgggcgcagtggctcacgcctgtaatcccagcactttgggaggccgaggcaggtgggtcacatgaggtcgggagttcaagaccagactgaccaacatggagaaaccccatctctaccaaaaatacaaaattagccaggcgtggtggtgggcgcctgtaatcccagctactcaggaggctgaggcaggagaactgcttgaaccctggaggcggaagttgtggtgagccgagatcgtgccattgcattccagcctgggcaacaagagtgaaactctgtcacacacaaaaaaatgtgtgtgtgtatatatatatatatatatgtgtgtgtatatatatatatatgtatatatatgtatatatatataaaatacatatatgtgtgtatatatatataaaatacatatatgtgtgtgtatatatatattttaatagataatccacatttatggtatgaaatgcaaaaggtactataggtagaaaaaagttaagacttggcttttttactctcttttgaggtaaccactggctttagttttttgggtaagcgtctaaagatgtttcttcaggtaacttttaaaagcaagctacatcataaaatctacttcttccctattagtgtaagagggacaccagtgattttctgacaaaacctggatgcatggaacagtatccctctgtccactgccctcccctcatactaacttctttactggaccttgtgcaggatattaacacatcacttagtaaatgtatgtacttgcaaacttttcaccttgcaacttgtccttccaagtagggctttgacagaaaggtatttttagagcagtgtttcctagatcttttggggtttaaaaacttgattgatttcatggcattgtactacttctaaaagtattgtttactatagtattaataagctatttttaagccatagagaattttaaaaaatatattttagaattttaagatttatgatatagagaagttgagtttgagaacaattctattacacgttaaggataagttaatgtattgaccaataagcatgacttattactggaacactatggcaggtacagaaaatatgtatttaaaaaaatttctaatgaagaagttaagtctacaccttgaatacagaaattaattgatagcgactggacagaactctggaactcagaccttagcggaagtttttcgttacattcttcagaaatatttggattaactagataaactatcgtctcctaagaatgatgtatgtagttacttacaagtttgccaataattcttttacttgttttatttctaaaatatcaatatgcatccatggacaattgaataaaccaaggcattgcaaaattaacgaggagaaaaaacacttcatagaagtaatttagttaaggtcatgaactttggttctgttggaacacgtctgtcagggagctatttcagcataaaacgccacacgatagctggattcattgtattttcatgtcctttatactgggcgtgacagtgcccagagtaaccatttgataataaatagcacagaatcttcccacttgtgtctttgttttctcaaggctggctcaggagagctttctttgggttaacttgttcctcatcttgcttgggggcaggaggcagacaatggaggcagagagattccaaatcagcttgggtagataacattcttgcctaggtaagcatttatctcgaagtgttaattcagaaatggtggcagagaaataccactgtgaaatcaccagtgtgacttcagtgtgcgtgcacttttttttttaaatcaaccatttgaagtttgaatctcttcattccagaagttatctttgaagtctgatctgctggcccagcaggcagtatgactgacattcttgtgccagagaacctcctgtattgctggtgggaatgtcaaatttagatcaatgagtatttatggaaagtgccatcttttctcattcccgaaagtatttcctgcatcttgttccattgctccatagtttcctgccagaacttcaggagattctctatgacaatagcagtgttaaagaagatgcttaaatttagcagatgatttttagttaaaagagaacaattagaagtgggggggggagggaaaaaaaccctcacaccacagttgattatggtacaccatacttttttctttgtttttcctttgacatggagtctcactctgttgcccaggctggcgtgcagtggctcaatgtctgctgactgcaacctctgcctcccagttcaagcgattctcctgcctcagcctcctgagtagctgggattataggcgcccaccaccacgccaggctaatttttatatttttagtagatatggagttttgccatgttggccaggctggtctcgaactcctgatctcatgtcatccgcctgccttagcctctcaaagtgctgagattacaggtatgagccaccatgtccagcctacaccacacatttaaatgtcttccaaccttttggtaatgacagaattttacccacaacaagtggaatcttgttatctccagctcaggacaaggaattcgttctttctccagatggctgccctccctgtttctcctgttcttggcattcttttggttacctaggcttcattttcttttctgtttttctttttctgtatccccttatccaaattgtctctcttaattttgtttctttccttgaaaaacttcctgatctttttgttttagtttctctctgttagcactgcaaatgccaccagcctctaaaccagctgctatagtgtaactagccgcttttttttttggtggcgggtggggggatggagtcttgctctgtcacccaggctggagtgcagtggcgtgatctcggttcactgaaacctctgcctcctgggttcaagcgattcttctgcctcagcctcccgagtagctgggatcacaggtgcgcaccactacaccctgctaatttttgtattttagtagaaacagggttttatcatgttggccaggatggtctcgatctcctgaccttgtgatccacccaccttggcctcccaaagtgctgagattacaggcgtgagccaccgcacccggccagccggcagctttttatcgggtctgtgatgctagctcgtgtcctttcatttaatctagtcccacactgcagttagagtaaccccgccaaaataccgccttcataatgttctccctctgctcctgcccacctgctatggccctcagtgacccctccaagttcagtcaccctgcccttctccacacctttctgtggctgaactattagcttctattgcaggggtctccttcctgtctaactgcacgtggtatattgacttgcagctgtgtgatttggttacatgactctctcacctgaaatgtactcccgtttcccactgaaaacctaacctgaccactcatgcacaggctgcaatataccaaccccagggcagcctcgatgtgatggcctgtttcaactgtctcaattctgaatctgcattgtattttgtgataaattggagttcccacccagccaaagttgccatccggtcctcttttgaatggctggtccagaatgacatgagccagtgtcaaaaagaagggacatttctgtttcgaagatcaaaaccttagctcccagcatttctttgaatacacagacaactctaggggggttctagcgttaaaacctgggtcattagtagccggaggggagtaacaccgaggaactccccacaggtagtcaggttgcctgagcaggcataaagccggtccctggactctggataacaaacccagccctggcccctctctgggtatgtggtccttcagcctcttagactttgtatcatccaatcaaatggattgcagttgatttgatctgggtaggaaccaaaatctgtgtttcaaaaaaccttttcccattttgtatccagaggcacaagaacctttccagttggtcttcaagcagaccctttgggtttctgtttcaaatagttgtttccagaactcttcctgccactgcttgctttctgtccttgctgctgtgtcctgtgatgggctagcactctttccccacccctcaaaatccacagtttgtctcttcagcccttttatctgaatctccaactctgccatttttacctttgcttttgtacaaactaagtttttccaactctttgcaacttcacccctggcttcatgggcatacttttgttcattctagaagtttggagtggggagaactggagataatgcatccacatatgaatgcttttggaagctcccagtgtttttctttaaaagggagttagctttttttgttttttttttttgagacagagtctgtcatccaggctggagtgcagtggcatggtctcggctcactgcaacctctgccttccgggttcaagcaattctcttgcctcagcctcctgagtagctgggaatggcctgtcaccacacccagctaatttttgtatttttagtagagacagggtttcaccatgttggccgggctggtcttgaactcctgacctcaagtgatctgcctgcctcagcctcccaaagtgctgggattacaggtatgagccaccatgcctagctaggagttagcattttatttttatatttatttttttgagacagagtctcgctctgttgcctaggctgaagtggtggagtgcagtggtgccatctcggctcactgaaacctctgcctcccaggttcaagtgattctcctgcctcagcctcttgagtagctgggactacaggcacacaccgccatgcctggctaatttttgtatttttagtagaggcggagtttcactctgttggtcagggttgtctcgaactcctgacctcgtgatccacctgccttggcctcccaaagtgctgggattagaggtgtgagccactgagagagttagcattttttcttttcttttttttttgttattttttttatttgagacggagtctcgctctgtcgcccgggctggagtgcagtggcgtgatcttgcctcactgcaagctctgcctcccggattcacgccattctcctgcctcagcctccagagtagctgggactacaggcacccgccaccacgcccggctaattttttgtatttttagtagagacggggtttcaccatgttagccaggacggtctcaatctcctaacctcgtaatctgcccgccttggcctcccaaagtgctgggattacaggtgtgagccactgagaaagtattttagagttaacacctcattggagaggagaatagtatttccttataggagtattgtcatttctattcagtttttaaattttttttcatgcacttgatcattcatttattcactcattcatccatgcactgaagacactttgggacctccactcctccaggccctgggtcaaggatgttcaaaggtagtgtgtctggagagccctgttctcggctgccttcctcactgtgaatcgaggacacttcttggcattcttagtgtatttgtttttgaagtccaaggaactgaaaagtgcatatatcaaaaggagttttctggccgggggcggtggctcacgcctgtaatctcagcactttgggaggccgaggcgggtggatcacgaggtcaggagatggagaccatcctggctaacacagtgaaactccgtctccactaaaaatacaaaaaattagccgggcgtggtggcgggtgcctgtagtcccagctactcaggaggcagaggcaggagaatggcgtgaacccggcaggcggagcttgcagtgagccaggatcacgccactgcacttcagcctgggtgacacagtgagactccgtctcaaaaaaaaaaaaaaaaaaaggagttttctccataagaaatgatgatcaagtaaggagttaaagtcataggagtggacattgccgtctacgttctgcttgctcatattcatgtaagttaggggtgaaatgagtagtccaggtcatgggccgaggaaagcgggggaggaggggcagaggcgtgcagtactggctggctgctttattggaggtgcggggtcagcttctacatcatatgccactgttggtgggtggctgtttcccttaggcttcctttcttccatggagaactcagagtcacctgcttggccagcacttctgtgtgtgtcagaagagcagactcaaacagtgacacagaagttccctctgtgggctgcacattaaatttcaataatatcaatacccaggtcttactcccagggattatagtgtgtccggtctggggtgggggtcctatcatttgcattttaaaaatgcttctggccgggcgcggtggctcatgcctgtaatcccagcactttgggaggccaaggcgggcggatcacgaggtcaagagctcgagaccatcgtggccaacatggtgaaaccccgaatctactaaaaatacaaaaattagctgggagtggtggtgcacacctgtagtccgagctacttgggaggctgaggcaggagaatcgcttgaacccaggaggtggaggttgcagtgagctgagattacgccactgcactccagcctggcgacagagtgagactctgtctcaaaaagaaaaacaaaaagcttcccaggtgattccactgtgcagccagggttgagaaccactcagttaacatcataaactttgtaggtgaatgcagtttacacagcaatgcaaggaggcaggatctgccaccatccctcgctttgtctgtagggtgcaagttggggcattgatcccgtcctgcccaccacagcccacaggctagtgctctgtacataacaaatgtggaatacttgggtcccaactgactctcctcatttcatgtctattttctgatattcccacagctctgtgaagtggggataacaacacccacacatctcagagctgtgagtaatccctgcacttagagaccacgttggatcagtgaagtggctcagggaaagccagtttcttctgtgtccccattgtcccttgtgtaatgtttttcacttggaaagttctcatctgatggttcattgttgcacttgtgtttaaatggatttccccacagtttagtcttgctttgctgacttggtcattcgccaagacccttcttctttgaaaaatactcttgatcatgtatgacatttagagtcctcaagttttgggataaagtctggtgttgcagaattgggtgttgattgatctggtgttgcactgaattgttcattctttaacgaattcatccaaaatttaaaaagtgtcctccatattcaggcattattctgtgccgcatcccttctttctcaatgcctttaaatggacaggtcacaggagccttttctttgggattatctgggccacccccttcttcccttatacaacctgctgatctcctcttgcaccttctcatgtctggcgactccagggtctggctgtctttattcacctactgctcctgtcctcttctgctcttgtttgtttatttatttatttatttattttttgagatgaagtctcactctgtcgccgaggctcgagtgcagaggtgtgatctcagctcactgcaacctccgcctcccgggttcaagcaattctgccacctcagcctcccaagtagctggattacaagcaccagccatcatgcctggctaatttttgtatttttgtagagatgaggtttcaccatgttggccaggctggtcttgagaactcctgacctcaggtgatccacctgcctcggcctctcaaagtgctgggcttacaggtgtgagccactgcgcctggtctgcttttgtctttagtaattgataattcattatgcacttgcttttctggcctccttcagaagtttgcctcaatatttggcttattatttctcttccacccaacaaaacaagccattttcctttccatatccctgtcacgctcagacatacatgcacacacacacccgttacacatctgtctatattgacttacagaccagctgcctacctggcttccctgctacaggcacttggagaggtatcgcactgaacccaaccgagcagagccagaacctgggcctgggcccgtctgcagggtagagcaggttcttctggaagggccagtccagctgcaagtgctgggatgaagtccaatgtagcatgtaatgtaacagttttccaagagcccagaaagctgttgacattggaagttccccctgagttaatggactgtgaggttgaccgtgtcatgccatccctgttgaattgcttcaatggcatctcattctctattgagtgggacttctaaggccctctgtggtctgaccctgctcagacctctccacagcctcttctcccactgctaaccacatcttgaccattctgtgatatctgtagttccatcacgtgagctttatttcacctatggcactctgacttactccagcccaccctgtcatccttcttattgtttccatagcaatttctttgtacatctgaccagtacaccatttttcacctatttgttgacttgcctgtctctccttaagggccgagagttttgcctatatttgttatgcctagcacagtgcctgacatacaatgtagagtctgtaaatatttgttgagtgaacaaatcccaatacagacaagcaatggaaatctgttaatagtaggtattggctggacgcggtggctaacgcctgtaatcccagcgctttgggaggccgaggtgggtggatcatgaggtcaggagttcaagaccagcctggcccacatggtgaaaccctgtctatactgaaaatacaaaaatcagccaagcgtggtggcggtcgcctgtaatcccagctactcaggaagctgaggcagagaattgcttgaacctaggaggcggaggttgcagtgagctgacatggtgccactgcactccagcctggcaacagagtgagactccatctcaaaacaaaaacaaacaaacaaacaaacaaaaataatgggtattatttagagaccagacagacggacagagggggttagggcagtcactagtgaggaagcagagcgaagatccgctggggaggggcaggggctggctccagaaggctaggagacctcagtgggtcacccaggcaggattttttttttttaagacagagtcttactctgtcacccaggctggattgcagtggcacaatctcggctcaatgcaacctccacctcctgggtttaagcgattcttctgcctcagcctccctagtatctgggactataggcacccaccaccatgcctggctaatttttttttggtatttttagtagtgatggggtttcgccatgttggccagactggtctcgaactcctgacctcaggtgatccaccacccatctatctcggcctcccaaagtgctaggattacaggcgtgagccaccacaccaggcctcaggcaggatttaaaggtggaacaaggaagaatccaggtaactagactaagaaagagaatggatagaacttttggaaccaaggcctctgctcacattattttttttattttttatttttgagatggagtctcgctctgtcgcccaggctggagtgcagtggcacgatctcagctcactgcaagctccgcctcctgggttcacaccattctcctgcctcagcctcccgagtagctgggactacaggcgcccgccaccatgcccggctaattttttgtatttttagttcaccatgttagccatgatggtcttgatctcctgacctcgtgatccgcctgcctcggcctcccaaagtggtgggattacaggcgtgagccaccgtgcctggctggcttccactcacattctaaaccagaatacaaggtcaggaacaagccagcagcagaaacaagaagttcagacactctctgcactcatgagtggagtccaaatatggttacagaaaatccacagaatctagtaaccaggaggaccctgatgacttgaagacattattaatttggcatgttctcatctacccaatcaatgcaaagaagaaatggattacattttttgtaacaggattatttactgatgatgaatattccattcagccttaaaacttacattatactcaacaaaaacttatttctagatttagagccatggatctctagccagaaattcattaacacacatagtcaacaagtatttgttgagtatctagaaagtgccatacaggtgacaggtggaccttgtactccagaccccagtgctaggagtcaagcatgagaagtgtccaagaatcctactaagtgtgttcctcagttcagatttgggagcgatttctgtttctgaaagtctcagacacctgtatcactccacttattgctgtgggatagtatcatcgtcaacagaaagagaattgtaattaaacactacatttctactgcatgaagtctccttttaaagaatatgacttcaaaatactctaatgtgactgcagacttgttggcatttgctgagtagtgatatttttacatatagtagaggtttttttttttttttttttaagggaactctacctgcatggctttaaagggctttctttaagtgagagaacagctgttctcctccaggcgttctgggctaaggcctccttctcctctcaggaacagaacaaaggcatacagaatttatgtcatagatggatttttgtttgataaaaatcacttattactaaacaaaagaatggcccattctctttagaaatatgagcataacatctcctgtgtctttagtggtttccaactttgttggtttacttttaattattataattgactgaatttaaatgggccgtgttttatataatcaaactttccttgaaaatgtgtgtataagatggttattggtaaagggaatcatttcaaattcaatattaaaataaatccaaaataatatttgaaggaatcagctaataaagaaaataaccctttggtcactgttgtaggggccagatgtggtcacacctataatctcagcactttgagaggctgaggcaggaagatcccttgagcccaggagttcgagaccagcctgggcaacatagggagaccccccaactctacaaaaaaaaaaaaagaaagaaattagccaggtgtggtggcatgcatctgtagccccagctacttaggatgctgaagcaggaggatcacttgagcccaagaggtcgaggctgcagtaaactatgattgcaccactgtattctagcctgagccacagggtgagaccccatctctaaaaataaaaatataaataaaacgtgtatccactttttggtggataatggaagccactgaagaagatggaggtacacgaggattggttagtccctacaatctgaccacataatcacaagagaataacttggatccaacacgcacttctgcaatacacattatgaacatacctttactagcaagcagactcataacaagtcctaggccatatccttcaaactgatagtcacagctttctgtctttttgggtattcagacttctctcttggtgattggccgccttcctaatgctggatacaggacatttcagggatcaagcatcaggttccatcaaattccttcaggatgtgagtttcaggccacataaatttataccacttacttacaagagtgaggagaatctctgttttaacagttttattgtagtataatttacataccctaaacttctgccaattgttaagtgtacagtttaatgttttttagtaaatttagagtgctatacaatcacagtctggtgtaaacctttccaagactgcagaaagtgtcatcattttcatttgtgcccagaaatcttctgctgtctgtactttgggaagtgcctgttctggaaatttcatatacatggagtcatacaaaatggagtcttttttttgagacggagtccagctctgtcataccccagctctgttgcccaggctggagtgcagtggtgtgatcttggctcactgcagcctccacctcccgggttcaagtgattgtcctgcctcagactcccgagtagctgggattacaggcacctgccaccacccctggctaattgttgtatttttagtagaggcagggtttcaccacgttgtccagggtagtctagaactcctgacctcaagtgatctgccagtctcggcccctcaaagtgctgggattacaggtgtgagccacctcacctgaccaaaatggagtcttttgtgtgtacttctttcacttagtattttctaggttcatctattttgtaacatatatcaataatgttctactttattgctgaatggtattccaatgtgtagatagagcacattttatttattcagtcatccgttgatggacattttgattgttttcaggtttttggagctatcaagaagaatgctgtaaacattcacatacaattctttgtttagatataggtttcatttctcttgagtgaaattcctaggattagaatatgggtcgtgtggtaagtttgtgttttccaaagtgtctgcactgttttacagccctaccagcagtgtctgagtgttccatcttccccacattcttaccaacactatgcattacctgatgatagacatacagtgacttcaaagtggtatctcatggtgttattttgtatttctccaatgattaatgacattgagcatcttttcagatgcttcttagccattcatatatctttggtgaaatgtctattcaagtattttgcccaatttttaatcgagttgtttatattcttagttaagagttttgcatatttcctggatacaaagcctttatcagacatgtgatttgaaagtatttttctcccagtctgttctgtgcttgtctttttttttttttttttttttttttttttttgagacaaagtctggctctgtcgcccaggctggaacgcagtagtgtgatctcggctcactgcaagctccgcctcccgggttcacgccgttctcctgcctcagcctcccgagtagctgggactacaggcgcccgccaccatgcctggctaattttttgtattttttagtagagacggggtttcaccgtgttagccaggatggtctctatctcctgacctcgtgatctgcccacctcggcctcccaaagtgctgggattacaggcgtgaaccaccgcgcccggcctatgcttgtctttttgttttcttaatggtatgttttgtagtgccataggttttttttattttttgttatttttatttttattttgatgaggtccatttgatcaattattttcttttgtgggttattcttttggtgtcgtatttgagaatttctttgcctaatccaagatcgcagattttcttctggaaagtttataatttagctattatgatccatttgagttagcttttgtgtatggtaaggagtcaggatgtaagttcatttttttcatatagatatccagtggtcccagcaacatttgttgaaaattgccttcgcacctttgccaaaaatcaaatgaccataaatataagtatatatttttggactctattttgttccattgatctatgcatctgttttatgctaatatcacacagtctggacttctttggctttatagtaagttttgaaataggtagtgtaagtcattcaactttgttaactttttctaaagtgctttaactgttctaggtcatttgtatttccaattgtatcagcttgccaatttctccaaaaaaaaaaaagccagctgagattttgatagcaattggatggaacctacagatcaatttaaggagaattgctgtctaacaatattgaatcttcccgttcatgaataagaaatatcttttcattcatttaaatcttctttaatttctcccccagaatttttataggttttctgtgaataacatttctttcattgaatttttcttgaatttctttcattctttttattattattattttttgttcaagtattttgttccttttgaataaagaaggctggtgtggatggagagctgatccagcccttctgtggctctcctgtttccaggatctcgttattacaattttggctggtccagctatcggttgcatgcaccctactgggactaaaacctcaggctagcccagctgtgagctttccccattcattttctaccaagttcactacttttgctgataagatcattaggcatgtgcttctgctctgctctgaatcaagccagccttctccatcagtggagctgctggctttcacggctagccctgccttaggaaactcccctgccaacgggctggggtgagaatggagctgcctctgctggaaggacgctctcttccacgcatcttacccaaaactctagcagcttttcctaaagaaaagcttcccagtttgttgtttgtcttaaggtgattttcagagtcctgaaatggttgcttttgaaaactttgttcacttacataatttttttgggtgggagagaatttgtcaacttccttattatgccatagacaaaagttgctctatattttatatatatacacatatggaatggggtgggggagagatagagagagagagagagagagagtcttacttggtcacctaggctggattgcagtggtgtgatcacggctcattgcagccttgacctcctgggctcaagagatcttcccacttcagcttcctgagtagctgggactacagacacgcactaccatgcccagctaattaaaaaaaaattgttacccaggctggtgttgtactcctgggctcaagcagtcttcctgccccgacttctcaaaatggtgggattacaggtgtgagccacgatgcccagctctaaaatgtaattgatatggagaccttgactaccatgaatttcaccagtggaaatctgtttccattagtcatcatgccattaacaatccactgattttactaatatcccattgctatattctccctggtaattaacaaagtgctggtgtcatggagacagaaagagcagggtgcctctggaatgtgggcagtattcccgattggagaaccaccagctaactatccaggaagacacatcacctgttttaatactagctgcttaacctgtgtctctcacacacacatataccataccacagtctatactgaagtattttcttttttttgagacggagtctcgcgctgttgcctgggctggagcgcaatggcgcgatctcggctcactgcaacctccgcctcccaggttcaagcaattcccctgcctcagccttctgagtaactggaattacaggcgcctgccaccacgcctggcgaattttttgtatttttagtagagatggggtttcactatgtttgccaggctggtctccaattcctgacctcatgatctgcccgcctgggcctcccaaagtgctgggatacaggcgtgagccacagcgcctggcctactgaagtgttttcaagctatttaactggattttcacctttagtcaaacctcactcagttaatgtctccagtttgagtaattgtcagcacactgaagtaaaggagaattccgtgggaattgcagtccctgagaggaagcagatgccaaattcaaagaagggctctttgggctgcttgggcccatagccccagaagctgaaagagagctggcactctcctggaaaccaatgaggcccttaaacttgccagccttcttcagagctggagcctggggactggagacaggaaggggagggctcctggaggagaaggggtagaaagtgcaacccagaactgaaagggagaaaattcactgttctgtgtgtacatcatagtggggggtgtagtgaggatagaccatttgagtattaccagtttgttttaaaagaaaatacattaaacaagactcgcataaatgtaatttaagagagtaatctattaatgtggtccagcctgggttttgattccttcattaccaaagtgtggacataaagtaaattttctgtcactgtattatcataatacagatatagggaagaacttaggaaatcaaaggaaacaaatttttaattttttaatgacagcagaggagagacagagagagagagagagagagagagagagaaaggtcctgaggcaaccagggaacagcttgtcaatttctacaaaaaaaaaaaaaaaaaaccagccaagggatattgggatattgctggaattggatggaatctatagatcaatttggggagaactgctatctcacaatgttgaatcttcctatctacaaataagaattatctttttattcatttagaacttctttaatttctcgaaaaatgtttataggttttcagtgtagtggtcttgaatttattttgttaaaatttttttcctaaatattttattctttttgaataaaactgagaaatttatagttctgggcactgcctgtgtggatggggcctgaactgcactggtttgacttaatatattgatttccctggttgttactgagttcaacttgttcatatgttgtgtccttaattttggaacccttgaagtttttcctcttaacagtaagccaaaaacctttgttttaactgaagtaccacattgcctttaaaaatagttgccaaaggtctccaagacttgaatgaagagtgaggaatctggagttctggttaaatagtgacagaaagctgctggaaggagtgagagcttatgaagcagtctgatgatcttgtgccaagtttggctgaatttattaaactcagggtgtttgagctggaaaaaaggtccaggagatcatctaatatcttttttttttttttttttttgagacagagtctcgctctgtcacccaagctggagtgcagtggcgcaatctcggctcactgcaactgcctcccgggttcaggccattctcctgcctcagcctcccgagtagctgggactacaggtgcttgccaccacgtgcggctaattttttgtatttttaatagagacagggtttcactgtgttagccaggatggtcttgataatttcttgaactcagtgcagcatcccctgggaacttgttaaatcgaagtatctcagccccactccagacctactgcatcagaatctgcactggaaccggatccccaggcgatttgtacatgtgaaagtggagaagcccttggctgggcgtagtggctcactcctataatcctggcactttgggagactgaggtgagcagactgcttgagcttgggagatggagacgagcttgggcaacgtagcaaaaccctgtctctactaaaaatacaaaaaattagccgggcatggtggcacacacctgtagtcccagctactcccggaggctgaggtgggaggatcccttgaacccgggaggcggaggatgcggggagccgatatcgtgacactgcactccagcctgggcaacagagagagattgtctcaaaaaaaaaaaaaaaaagttgagaaaccctgcagtaattcttatctctctaccttgtgcgtaattaaatcttagttatcaaatgtgtgaatgctaaagggtcatcttccatctaccttaatgttatggtattattaatcaaccttagatcatgttagcatttttcctagcgctgttctcacattgtgcacacctctctcagagaaccgtaacatcttttccacctttgccaggacttgctgtgcttgcacgtggattttgggggaaaagtggaaggtgctgtattgatccctactaaacttactctggttttattttggccactcttgagattcccctaattccatgtacttttcacacatttgatgccttttttttgaccgagtctcgctctgtcgcccaggctggagtgcagtggcgcgatctcagctcactgcaagctccacctcccgggttcatgccattctcctgcctcagcctcccgagtagctgggaccacaggcgccccccaccatgcacggctaattttttgtatttttagtggagacggggtttcaccgtgttagccaggatggtcttgatctcctgacctcgtgatctgcccgcctcggcctcccaaagtgctgggattacaggcgtgagccactgcgccccgccatttgacgcctttttaataccattatctaagtcaggatttaaaatattgaacaaggaagtgttggctacacagcatggaaaacccaattctctgctcctcaattcagtatactttatgttgcttgcgtcatttttaaagaccgctttttgggaaaatatactccttcccaggttttccccatgcgattgcgcctgtgcggtgaatgagcatgtgctgccaccacaggaaattggttcacatggagacctttgggatggccagcagaagagactgagaagttgcttgagggaaaccacgagtctgtattatgatgtatgatgtatgtatgtagcatgatatatgtagcgtggagaccaaaagaaacagggtttaagaaagagagaaagatcatttttgacaaaagctgctgcaagttcaagtgtactgaaagtaagctgcttgttgggtttgccaagatggaagctatggagaccttgcaaagggcattcttttttctttttcttttttttttttttttccgagacagagactcgctctgttgacaggctagagtgcagtggcctgatcccagctcactgcagcctccgcctcctgggttcaagtgattctcctgcctcagcctcccgagtagctgggactacaggtgcgtgccaccacgcctggctaattttttgtatttttagtagaagtggggtttcaccatgttagccaggatggtctcgatctcctgacctcgtgatccacctgcctcggcctcccaaagtgctggcatgagccaccgcgcccggctggcattcttagtgattaaaaggaacagcttctcagttggaactgagtgaagagagaatgtgaggcaaagaattggagacaatgaagacaattcttgttatatacagccttaatctaggaatagccttttgaaaaagagaaaaactaccaggttcaaagtatatgtgtttataaagaggtggcttcatttcagggggaaaatggtactagaactgagaaaatatagtgttgtatcaatcccagtgagaatgacaccaaaataatttaactctgtgcacctgtgatcagagtgttttgttgttaaatatatttgtctgccattggtgcataaggtaaaacgtaactcaaatgatttctttgtctgtaagatgaccctttagatatgtactggaataaaagtagctctaatcctgtggatccagccaccttggggtcttcgtgctggtgttctgttagagatggtgatgcatttgacatctcaagtgccaaatgatttgatcggaggtactggtcactggacatttttaaggacaatttcttattgcagctaccactaggcacatgcaggaccagtcatgtaaattgaggagccagtgcaaagtgaaaatgtgggactcttgctttaaattcttaaacatttcaacagtttcagcatagcactaaaccaaaagtgattgtgcaggtcacatactcatgaaatggtcctcagcacatgccccgggatagtgaaacaaggatgctaaagttttaaagcataagcaagtaacatctgtacaatcaagtgcagaagtggcagaagaaaggggaagaaataactaagaccttcagggttttgtagaaaagttcatggcctttgaaagtgttcgggctggttagaaaactggtgttttaagtatttaaataaaggatataaatattgcaagtgttataaatgatataagtaaaatttaatatagctgcattttaatccaacagtgttgtcattattcaacttaaaggctgcatttgcttttttatttttcacctgtaaggatttaggagagaggtacagtgacttctcaggacactgggaatggtatgaaattttaaatatgttgcatattgtggtactattgtgttttgcctaagtgcaataataattttaatcaggtagaacatttaaattgttgtccttggaaacaaaagagaaaactgcttcacgatgaatgaattaaagttcttttctctgcaactaaacttgtatactaaatgaaaaatcacagagtcattgaatatgagcatttaaatgaaccattgtgagaggagtaggcggatactgataacatactgtttttctgcagaaaatatttgtggttaacttgttcataccatgtgtttctcttacaatcaaaacctctgtctttttcaaggacaccttgagcacattgctagggaaatggaacttttaacaaaaccctgctaaatctttctgcttaccaccccctcttgttttctgattaaacttctcttcatcgtcccacatgaggggggaaaagaaatcaacttgttaaatgccagactcccaggagtttgggtttgacttttctctcactgtatggggtctttattccctccctcccttccttctctctctttttctctctctctctgttctctttctttctttcaatatctctccctgtctttctttctcaccacccacatattttcttgtcctgtgctggaaagggctttggtccttgcctggtggaatcgctagaatatcttaaagcttttcttttactaacagccatccatgattactttggtttagtccaaaaaccaagaatttgcttttgaaggagggggctattctccccttagtgtttctgcatcaagctgaaagagctccctgcttagagtaagtcaagtcaccttccttaaaaaaaatactcccaggtgttagagatctctttattagagtcataaaataactactggttattttaaatagttctctttggaaatgaaagtcccgttttacattaaacaggcaagactttgatatatttcacatatttaagccttagctttgattttttagtatttaaacatactgagaatactggtctttgagacacaaaatgagttcatttagtagtggtttaaaataatttttaacttataacgaataactggaaacagaatttctttaagcaggggactcctgttacaggaacatgtttggtggcaggtttcccaggggagaggatccgggaataaggaagcacttattgtagggtgccattgccacttgctgatggctcagaagtggagctgaggcctcttggaactatgtagtattgggaacgcatgttcatgtatacttaattttcaaacacacctactttatgacacgtggctatatttgtattgttttctggggaaataaaaggtttgagtgaagatgaattttgccacaacttgtaaacagccccctgaacctgttggggatgcattgctccgaatcatttcagtttaatccttcccccatctccacccctcacacctttcctatgtgttcacagccctcagcagtcacagagaacatgtccctgaaaacgtgctggagcatcaagtgcaagaaatcagataataattatgttcgaagagggtgattttattccccaggagaaataaaacctcgctcaggcaacagggggtttattgaggaccggggctggaggcagctgctgccaggcccaccccaggtcattgggccttcgcctgagctcttggcttgagcccctcccactcaccttcacaatccatgtgggtgagaggtcatgggcctcctggctgccttgttcctgagatgcacgggatcctggaagaggaggtagggcaaggacactagcagagtcacctcaccaccaagtggaattcttcctctgcccttaactccttgcaccttccctaccagggttttgttttgttttgttgcccaggctggagtgcagtggcacgatcttggctcactgcaatgtccgcctcctgggttcaagtgattctcctgcctcaacctcccgattaggtgggactacaggtgcttcaccacgtctggctaattttttgtatttttagtagagatgaggttcaccatcatctcctgatggtggtcttgaactcctgacctcaagtgattcgcctgcctcagcctccgaacgtgctgagattacaggcatgagccaccaccctggcccctagcagggttctttacctttatggtcccaattaatccctttggcagagcttgtggacctattctcagcatggtttttgttgctgttttttttagagacaaagtctcactgtctcccaggctggagtgcggtggcgaaatcatagctctgcaacctcgagctcctaggctcaagcgatcctcttgcctcagcctccccagaagctgggattacagacctgagcctccgtgtccagcctcttgacatatttttaaatgcataaagaatatattagacagcaggcactgtggctcatgcctgtaatctcagcagtttgggaggctgagatggaaggattgtttgaggccaggagtccgaccagcctgggcaacattgagagactctgtctctacgagaaaaataaataaataaaatcaaccaggcatggtggcatgcaccctagccccaggtactcgggaggctgaggtaggaggatcgcttgagcctgggagttcgaggtggcagtgagctgtgattgcaccgctgcactccagcctgagcaacagaataaaaacctatctccaaaaaataaaataataataaaaaaaataattttttaaaacaaaaaagttagaaagccaagtatgttaaaattcagtgttacccgtgcatggctagctccttctcattttttacataacccgttcagtgttacctcctgaggtgccttcccttgtcggcttacgtgacaattaaaagattgtgatttacaaatatgcagttaacttacaggggcacaagtactcagtgtggcaaagccaacagcagcaagaacaataagatcaaatgagaaaagggcagggaggaaggaggagacgaagggaggaagggaagggggaacgggcgaatcgtgctatgaggccatgccttgacaagcccctgagctgagctgaggtcagcctttcctttaggcctctcactgtgcacatttttctgggctaagagtatttcttctatttcgaggtatgtgcttttcatacccagtggcccctaaaggccaacccacttcttcttctaaaacttaagagaaacagagattcaaatatatgagctataatcatgaaagactaattatatttgaggaaacttagtgatacccccgataatatgaacataataagagcagctattttttgagatcttaatacattgtatgaaaccctttacctacatgatctcattgattgctcacaaaaacgcctgggtgccgtgcttctcatcattcatatagagagactgggaggtaaagccctcggccaaggccacactgatggcagccagtagacctggaattcacactgggggctgcctgacttgaagcctgtgttcttcttctttatcaatgccatctttcctaggcactagcgatttcagagtttggattccaacaaaatccaaatacatattgatataaaaatacataattagaattaacatttccatttgaaacctggacacacaggttagacactcaatatgctatatttgaatagaatttactgtcttgaaataattccgcatgatgtaggtttactcacatcctgaggagtgggccgggggaaggaagagctggttgccatgggcatctgctggaagcaaagccatcctccaggatcctctggcttcctgagccaagatggcatggagcatcatctgtttctcttccaactcatcttatggtggaagttgtgaaggagcaactttcctgccagtgctccaccccttattcacccattcctattctggaagatagtgataaaatctgattcttaagaattggaaggttaacctatgaagggatagatttaaagacttgatgaactttgattttacctgcaatatctcaaccaggacttgttactgctaccaaaactcccactcattatgacatttttgtcatctttctgaagtcattacaggacattttatagacctttctttttttagatgaaagggtcaacttcagtccgacgcacaaagaagcaaagaataataatttttctctctatttctatttgcttcttttgtccaagaagatcaaagaattaccagattatttctgtccacccttgcgcacactgaatggagaaaagtttttctcacttcattttctaaatagagagcgagatcatggtgggcagatttagctggtagtttactaaggtaaaattaagaatcacagcatctcagaaaaaaaggactcgtagagatactcatttaatagctgaggaaattgaggctgagaatttgacttgaccaaagacacagagtcggcagcaggctgagtctagattttaggtgctgggtcccgtgcgcctgtgtggtccctgagggagaggcagagggatctctttccttcacttgctcattcttccactcaggcattatcatcattcacgcgagccagacactgtcctagggccgtttttgtttttattttttggaaaaggatagtgggggagaagaactggggagagacaggtcagtaaattcatgatctctgtatgaatgataagtgcagtggggcatgctgagctgaggtagaaccaaagacattcgcctggggttcaggaaagatctggacttggctggaaggatgaatagggcgtgaatggatctatgaaaggtacaaagggaaggaaattgaaatggatctaaagagcatggagaggagtcagtgaaagacgttatatctgttcctgtctgaatgcatgcccttctatttctgcctaggtgatgcctgatcatttctcttgctctagaatatctcctcaaatctgttttcaaatattgctgcagttttaatattatgtttatccacatcggtgagaagaagcttctctttccttcttggttgtgagaaccctggggtcaggaaaagctcggtcattcatcatagtgccctgggaggtgcctggcacagtgctgcacacctaagaggtgcttgttaaaagtttattgaccttaatcaaacattcattctcagccgctttttctgacgcatatgtgtaaatcatagatatgttactgaataggaatccagccaccctcctaaaattcatgtcattagaataccttaatcttattaacctggaatactatgttattagaataccttgatattattatcctggaatattattaaatagttccagaatttttcactaaatcatgctatttgtagttgttagaggtgctgtttttattgctcagtcaggtgactaccaggtttcaaagaaaatgctgattaacagggtagcttctttccaataccagacttctctgatcaaattatagatgttcacttgggcgaatgggtaagattaagggtaaaataggccaggagcggtggctcacacctgtaatcccagcactttgggaggctgaggcgggcggatcaggaagtcaggagatcgagaccatcctggctaacatggtgaaaccccatctctactaaaaatacaaaaaattagccaggcttggtggcgggtgcctctagtcccagctactccggaggctgaggcaggagaatggcatgaacccgggaggtggagcttgcagtgagcggagatcgcgccactgcactccagcctgggcgacagagcaagactcttgtctcaaaaaaaaaaaaagaagaagaagaagaacaaaagagtaaaataaatggaaaacaaaatggatttgtatgttttttaaagatcacaaatttctcaatttagattgagaaatttagaaacttaaattcctacttttccaaatttctccatggattgaataagtagctttgtttttcaaaataaaaactcccaacaccagaagccaccctgattattcaaccctataaaatattcatattctcttgtttcattctggaaaagaatgatctggaaatattgcctcagatcctgtagctaagaattgcaaatcattttcttttcagaacatcaccttgattttgagtatggatcaagcaaatacaacattttctagaactcagaaactttttttttccaaaatggaaaaaaaacctcatacttctcttacacacaaatgaattaagactttgaatgcttggcttctgaatcatttgaaaaatattggcgaagaagttgttgtaacaagtctcaggcctagccaacattttagatgctttggttttaagacagggaagatacatgctgctgggaagaaacccaaaaacctctaaaaatgaattataaactatctggaagtgtctcagctgtggtaattatggtagtggcattgttgtctgccaccttggtggccgtttttcacctaatgtttataagagaatcttccagtaggttaacatgatcctgaaatgcacttcaaaaggccaagtgtacagaaagggtttaaaaacagtaactgctagtgaatgagaaggaatttatttcatgctcgatggagtttggctttataaattttttagctgctggttaaatccacagtagaggaatgattccattgtgtgtcctgagtggaagaaaaaagtaaaaattagtatcacagtaacagtgactgaagtgaataacattttctcaacaaaaaacatgcagactaatttattaagtccttgatgaagtaggtgggaaaactgtgtcacgccacataggtacagtcctcgttttacccttgatttttatgtgtaaaaccaaacatagcttcttggtactgtcctgatcctaatgctccttctcactctctgatttcctatctcacctcctgctcaatggtcatgtggttcccctttattgaactatttcagtagtctgcaatgagtcagcaaccttagggactttttaaaaaattttatttaccagtctgggcaaaaagagtgaaaccccatctaaaaaaaaaaaaaaaaaaaaaattctgtttaaaacatgcttgctctagtacacatttctaaccccaccccccaaccgccgctttttttttttttttttttttctgagacagaatctcactctgttgcccaggctggagtgcagtggcgtgatctcagctcactgcaacctccgcttctcaactttaagtgattctcctgcctcagcctcccgagtagctggattacaggcatgcgccaccatgccccactaattttttttgtaattttagtagagatggagttttaccatggtggccaggctggtctcgaactcctgacctcaagtgatccgcccgcctcggcctcccgaagtgctgggattacaggcgtgagccattgcgcccggccccaaccttctttcatcttctttcatcttggaacagatgtggttctttgcaacaaaaggatagtgattaactatgaaaagggagtaaatataatatgtaagacatcatttttagcgaatatttttttccaaatattagcttatctgagaaggaagatttagttttagtgaaagacaacccaaatatttttatgaaattaattatttgaaggttttacttgcataggcatgctaatgaagtatatttcttctaaatatactttcaataaaaaagcaatctttctttttattaaaagtatatttagggcccggcgcggtggctcaagcctgtaatcccagcactttgggaggccgagacgagtggatcacttgaggtcagaagttcaagaccagcctgaccaacatggtgaaactccgtctctattaaaaatacaaaaattagctgggcgtggtggtgcgcatgtgtaatcccagctactcaggaggctgaggcaggagaatcgcttgaacccgggaggtggaggttgcagtgagccaagatagtgccactgcactccagcctgggcgacagagactatgtctcaaaaaaaaaaaaagtatatatatatatatatttagaacagccaggtaagaaacctgtctagtgcaaagaactacctgatgctgattactataactgagatattattctccaaaaacagttaaatttatgttcatgaggtttgagctgctttttctcagtggctcagggcaaagactccagcatacatagtgtgtggtgcccccatgactccctggccccctcccctcctcaataacacaagaccctgcagttactcagattgggaggtagtggggagttcttttgatgtcctgcaactggtgggggtgaataaggagcaagtgggaacattcgttaactggtgaagtatttgttgttaatagagaaatgcattgtgaagtcagttcttgtaaccttggtttctttttcttgcttgactagtctttgtgaagggaatggatagagttgattgtactgtaaatctaattgcatgtatgtaatacagaaccaaaaaatgtcattttagctgtttggacaaaacgctatagtttaaaagcatattttatttaaaatgattagctgataagagaaatttgaatcagaatactagaatattatggtcataaaggatggaggaaattattgtttatcttagtaccaaatagaataaacgtcagcccctgctacaggtaagtaccacacataagaatgtatgtgttactgtaggagctacattattacataaaatataactgtctaactactggttgatgaaaataataaattggggagctacatgattaaacataatgactcatctggttccgcataaagcatttttttttcttattttatattaaaaacaaaagaagtccctttacagggatatgataaaaataagcatctttaagttaaaaatgaaaataaatatattaaacatagtataagatgtaacttcatattatgtttcaaaattaagaataatgctttagagtacaaatattaaataactattttatcttgagagggtaaggacttattgacagaatggggtccttctatttgacagaattactaataggtagttctgttttatgtaaaaagtttttgaaagactacctaatgtatttttttaatagatgcatggtaaggtttttagtgtagcaagtgttagagaaataaccatttttgtttgataatttaaaatttaaaatatttataatggaaaagatcattgaacgtattaggcagtgcctaaaaaataacagtggaagccatgaattccttctgtgttactaaaattacactgtgctattttaaatttcactgaaaaataaacatttcagtaatggtatttctatatggtttttacaaagaaaagattatattctgtgatcttttaagatcaagctgtactatgttagagaaacgccactaagctgagaccctcgcagtatgctctcagctcagtgtccatgcctggagaatgtctcctcaacatcgcgtacaccactgtttctagatctttacagaatcttcactgctgctatccccttttaccaagataaagttaaatctccaaagaaccgaatggaggtacttttctcacagtcacccagaaattgtttcctgaatagtttggacctggtactgatcttggctgcttaaagataaaatcagctgagacaaaggaactgtacaaaggcaaagatcaataatgacttgaaaagcattttgaaaactggatctttgggttctaaaattttgttcagcaaagaaaacaggagtaaagaaagagaagagagagacaaaaaaaaatcctagataattatagaaaagaccttgtaaatactaccagtgtcaactggaccaaagtgaggacagaataaatgcccttctttcaagtgaaagacgttcgaattgcattgataaatatatgcattggatcatttgaaacttcccttaaggcctgtttcacagcattttattgtaaacattttcaatcagaaaagtggaaagaattgtacagtgaacccccatactctcgccttgttttttttgtttgtttttttgtttgtttttgagactcagtctcgctctgttgtccaggctggagtgcagtggcacgatctccacagcggctgaactgatttacactcccaccgacagtatatacgcattcccttttctccacagcttctccagtatctgttgttttttgactttttaataatagacattctgactagtgtgagatggcatatcatcggaagccagcttactttgtggtgcatttcgaagtgaattggagacataagtagactttactcctaaacatttctgcatgtacattggtatttatgattcttttatttatttatttatttttgaggtagaatgtgcacatactaagatacacggatctacccaaatcttaggtgtactcattctatgatttttcacaattgcatctgcctgtgaaacccaaagctttatcgagatatgaacgtattaccctagaaagttcctctgtcgtttcatagtcaatccccaccccctgcaacaatgttttgacttttctccgtagatgaattttgcttctcccagaatttcatatagatgaaaccctgctgcgtatactgtgtttgtgtaaggattccttcattcagcacatagactttcaatctccttttgattcacctaccaagtgggatggggtaagctcattccttggatttcaagtggctcagctgatttggtaaattttcactttcaggcctgtttcctgccattctcaatcttgccagcaatgctcacatcagcaccaatgccacctgtggcgagaaggggcccgagatgttctgcaaacttgtggagcatgtgccaggtcggcccgtccgaaacccacagtgccggatctgtgatggcaacagcgcaaaccccagaggcaagtgtcgtgcctttatttctgaaattcccatgggaatgtacactttgtgaaatgaggactgagacttctgttaggaagccataaacattgtgttcaccttcactgctctttgtttccactagcggtttagaacttaagaaatttaaagcaacagccgagaggaattcatgttttttattttcttttaacagaacgccatccaatatcacatgccatagatggcaccaataactggtggcaaagtcccagcattcagaatgggagagagtatcactgggtcacaatcactctggacttaagacaggtaggtgaggccagaaccattgaagagtgtctacaggctgctgaactgtggtcttctgatgacttttgggaaagcctggcttctttctgaacacatttacattctagtctcactatttccaccaggtgaaggcaagtggtatacagaaggagtccccggtgccatttcttgtcactttcatcattcccaggtgtctttggggagatgggtgaaattgcttccatatggttgatgttctttgaagctgtgtcaacagggcacactcatccatccagggtatcatgtcaggctgcttgctggctgccaacagatgcatggggagggagagggggaaaacacatgtatttcctaacttttagcttactgtcttgctaatgtcattgagtaagttattgtataaggattatataaggctagaagaaaaaaaaacaaaacggtgttaaacctcttgactgtgtctcccctgccagatgcagtctgtctgggccaggtaagctggagttgcccaatactaacttaagcagtgccttcagcatgagtggggagagggaaggtatgactggctccagccacacctgcatcttcttaccttgcttcaaggccacataggaggatggagagaaatatgagatgagccccagttgccctgatgttcctgggaaagaaaaagaaaaggagtctgagtggaagaatgaaaaagagagatggcaggtgttttggagcttctgtcctggttctgttttgagcttttcagaaaagccatcgcattaattcttatttatttccattcagtttctcttgtgttagaactcataagtttcatgtaaaatatgagatcggttaaaagacacaagtaattgtaatgtgcattgtaggatttaaataagaattatagagatttaaggacaatcagaattctttgaataagtgatagttttaaaatgtgcaggaattttttttattttttatttttattttttattttttgagacaaagtatcactctgtcatcaggctggagtgcagtggcgcgatctcagcacactgcaacttccgcctccccggttcaagcgattctcctgcctcagcctcccgattagctgggactacaggctcctgtcgccatgcccggttaatttttttgtgtttttagtagannnnnnnnnnnnnnnnnnnnnnnnnnnnnnnnnnnnnnnnnnnnnnnnnnnnnnnnnnnnnnnnnnnnnnnnnnnnnnnnnnnnnnnnnnnnnnnnnnnnnnnnnnnnnnnnnnnnnnnnnnnnnnnnnnnnnnnnnnnnnnnnnnnnnnnnnnnnnnnnnnnnnnnnnnnnnnnnnnnnnnnnnnnnnnnnnnnnnnnnnnnnnnnnnnnnnnnnnnnnnnnnnnnnnnnnnnnnnnnnnnnnnnnnnnnnnnnnnnnnnnnnnnnnnnnnnnnnnnnnnnnnnnngtggctcacgcctgtaatcccggcactttgggaggccaaggcgggtggatcacgaggtcaggagatcgagaccatcctggctaacacggtgaaaccccatctttactaaaaatacaaaaacttagctgggcgtggtggcaggcgcctgtagtcccagctactcgggaggctgaggcaggagaatggcgtgaacccaggaggcagaggttgcagtgagccgagatcacaccactgcactccagcctgggcgacagagcgagactctgtctcaaaataaaataaaataaaataaaataaaataaaaaacaaaaaaaaataaaaagagaaaagagcttctttgaaaagagcttctttgttgttgctgttgtttttttttttttttttttgagacggagtatcactcttattacccaggctggagtgcagtggctggatcttggctgnnnnnnnnnnnnnnnnnnnnnnnnnnnnnnnnnnnnnnnnnnnnnnnnnnnnnnnnnnnnnnnnnnnnctacttgggaggctgaggcaggagaatggcgtgaacctgggaggcagagcttgcagtgagccgaggctgcacccctgcactccagcctgggcaacagagcgagactctgtctcaaaaaaaaaaaaaagaaaaagaaaagaacagaaaaaccatagacatatagttataggctgctttaggtaatttttagtgttttaggatatgcttttaaaataagatcacttaaaatagtattcagaaatttctttaccatttacacagtataaaaattctgctgtgctttgtttttttttaaacaaagcacattatgcttatatctgatcaagcctttctcagatttatttatttattgagcctttttattacaaacacttttgcatatgtagaaagcatattacagtgaatacacataacccacccttgagatttggggattttaaaacactggaccatgttcgtttcagtgaattgcagtcatcacaacattttaccagtccttcagtttgtgtcttcaaaaaataaagacgtttgttctgattagataccataccatttcagcctccttgggcaaaattaacagtaatttcttaataactcttttcccatccacattcaattttcccagtttatcaactagtatcttttaccgcttttttttttttttaaccaggatccagtaaggaccacttgttgcattggattgctgtgcttcttaaatctcttctcatctgaattgtccttcacttaaaaaaaaatgctattgaatatatgaatagaccagaccagttgtcctgtagaatatgccacattctggatttgtcagattgtttcttcatggttttattgaacatattcttctgtgctgtctatttcctatacaccaaattcggctctagagacctgattagattccagttaagtgtttttcagaagaccacatcaccagccatcctctcgcctcacatcaggaggcacccagggctggttgtcccactagtagtgatgctaaatttgaattctctctgggtgttaaaagtcaggtttcttcgttgtaatgttacttccttttttctgtccgatatccccattgtttcttagatctcactgacattcagatctacagcatggctataccttctgatgacttttttttaccttgccaaaatctgcatgtttccttagccattagccaactaccggttgttttctagactatatactccatgagggatgggaccacagctgtcttctacttttctttctcttccctttcctttcctggttagtatttatagagagatgtcttattcacttctgcacacccagacattggcacagttcaggcactgagtcaataattgcgttatggatcagtactttttttttttttttttaaatggagcctcactctgtcgcccaggctggagtgcattggcgtgatctcggctcactgcaacctctgcctcccagattcaagtgattctcccaccccatcctcccaagtggctgggactacaggcacacaccactgtacccagctatttttgtatttttagtagagacgtggtttcatcatgttgcccaggctgaccttgaactcctgacctcaagtgatctgcctgcctcggcctcccaaagtgctggaattaccggcgtaagccaccgcgcccagcctagtgctttctttcttcctttattttttttttgagacggagtttcactcttgttgcccagactggagggcgatggcgcgatctcggctcactgcaacctccgcctcccggggttcaagcgattctcctgcttcagccttctgagtagctgggattacaggcatgcaccaccatgcccggctaattttgtatttttagtagagacagggtttctccatgttggtcaggctggcctcgaactcccaacctcaggtgacctgcccgccttggcctcccaaaatgctgggatcacaggtgtgagccaccgcgcctggccttgtgctttttttttttaattttttttaacttccccccctcctcttttcttgttcacagcctgaatagaaaagaacaaggaacaaaccttttggctgctttgtttcagtactataaaaatgtaaaatctaaagtatagatttctaaagtaaaattacaggtagaccttagtcttatcaagagttgtaaaacttaatattataaatgtgtctgtgtaacttggtaaatatcagctcttgaggttttatgaccaaattagctgcattctgtgttggcaaatgctaacattgatcctgttcctgattctctaattgatgacagctgtcagaattacagcattttttttttttttttagcctctatgtattatgtttggttatctgcaagataaactaaagaaaagattaaaaagtagtcttatcagaagtccataaatgttgtatggtttgcaataaggtttaactactgagtgtttattttagtaacttattacaagaggaataatgagatttacttctttgctttttaaaaataatgtctactattcacttctttcattgattcacagtattttagaagatacactgtcagatatctagcagtatcttacttttaaaaaattcataggaatttcatgtgtgtggtatttttaagaaaagtaaagcataataatcatcaactttaacaaatacaaaattaacatatatgttgtggtctccattaataaaatgctgctcaccaagtggtttaggatctcatatatcaatactaccactgaacagtgatcttttttgacaacttaaaatttaaaagaaattattctgaaagagcatgcacatttcatgaatcttgcatttataattgtccaaaatcctataggttccacgaattataggaaaatttattccctatggtagcatttctcagtagaagaacacaaatatttcccgtttgagaaccactattttaaaagttgagatgaaaagatgttcatcgtcattattcaatagggaaatgaaaatcaaaccacaataagataccccttcacacccattaggattgctatattgaaagagttggaaaataataagtgttggcgaggatgtgaagaaagtggaaccctgtacactgtgggtggaaatgtaaaatggcacagtgttatgaaaaacagtgtggttgttctggccgggcgcggtgactcatgtctgtaatcccagcactttgggaggccgaggaggtcggatcacgaggtcaggagatcgagagcatcttggccaacatggtgaaaccccgtctctactaaaatacaaaaaattagccgtgtgtggtggccaatgcctgtaataccagctacttgggaggctgaggcaggggaatagcttgaacccgggaggtggaggttgcagtgagctgaaatcacgccactgcactccagcctggtgacagagcagcgctccttctcaaacacacacacacacacacacacacacacacacacacacacacaaccagtatggttgttcctcagaaataaacatagaattacagcaattccactactagggaatgccttaaagaattaaaagtagggactcaaacagatgccagtgttcagagcagcattattcacagtagccaggaggtggaagcaacccagatgtccatcaaccatcaacaggtgaatggatagtgaaaacatggtatgtgcatacagtagaatcttagccttaaaaatgaatgaaattttgacacataccacagcatgtatgtaccctggaaacattatgctaaatgaaataagccacacacaaaagaagaaatattatatgaatcaatttggatgaagtacctggagaagtcagttcatagagacagaaagtggagcggggtggttgccaggggctgggaggagatagaatggggagttgttgtttaatgggtgcagagtttaggttcggaagttctggagatagatggtagtgatgattgcacaatagtgtgaatatacttaatgccactgaattctacacttaaacatggctaaagtcacggttttatgttatgtatatttttctacaacttaaaaaagttaatacactgtgaaatatttggtgtattatgtcagccagggtcagtcaggaatatggaagccacaccagtcatttaaaggcacaaatttagtgtgaggaattggtttgatagtgtgggagagctgggagagggagcaggcaggtaagttgggggtagtaatggtggaggaggcagcaacacaggagggtgtggttatagcgcctagagcctgggaagagagtctcttatctttcagaatgctcttctgggggtcctggaaagctggaggctggagtcagctgctacagcccaaggcagagggccgctgctgggcaaggctgataggacccggaagtagacaggggagaagtcctgccttcctccagccctccagcctcccactagtgtcgccgtcagggagcatcgatttgcagcgtcccagcctcagcatccaaagctgggctggcaggtgcttagcaaccagcgcaaacacttcttctcagtaggtggtcacttgcaccagtataccaatagaaacacagagacagagcagccctcgacatcctggggcaggattttgttattatggtggtcagccacatcctaaatatgctcatattaagttttttagaataactttggaatgaaaatgcaaattttagaattctcctggagaaatcatggactgctgtctaatacattacaaactaggtgttcttggttctcagccgagagcctgcatcagggcaccagcttggtcctgggaccttcaggacagggatggaggaaatacagaagcagttccatttatgtattaactattgggttttggtggcgtgatgtggtggagatgcatgaagtgtggtagggtgatatatacaaagttaaatgtgatagcatatgaaggatgtagagtagctaacaaactcctcacatttaataaacatgagttttctttccctctgtcatatttctaatatacaaattactttaggttcccaaagatcttcagatatcaccaagggaaatgttaaacaaggccttaatagaatctaattacagttagctaacaggattaaggagtgcagttatgcagattttgagaaattcataagtcaataattattctgttttttctgattaggaaattaagatggaatcatcatagaaaaatggaagataagataagtgtaaacaggcagaaacacatcatctctttgctctgtaacaatcgctaattgataccttgggatatttactttgtcatttgcctacaattctatgcatttaataatgctacgacaatactatcatgtattacatacttactgtgccagacattgtgctatgcacttgatcaggattatgtccttgaattctcataatcgcctgtgagttggctcctgttattatccccttgtgacagatgatgaaactgagacttagagagtttaagaggcttgctcaagggtaggactcactgaagcttaagagcctgagctctgcatcattgcaccactctgaccctccagctgagacagattatgtgatatataaatttgtgttctaatgttttatgtaattgtatagcatgaacatttcccagtataactgaaattcatgattaataattgttaaagctgcattaatagtttctatatggcttacccatcatttgcctaagagtcctcaggcctgacattttggtgctttttctgttatgggtaataacttgggctttcagtgaaaaaaggttcatttcgtatgtataccaatgaagtaatacagtgagtatcaatcatgtttgaggtttatatgacaaatttatggttaattttgttttgagcatcttttgaaagaggaatgttattaacaggtacatatataggaatttatagatatgggttatagcatttttttcctcatccgtgttatttcatctgcttttcccagcagttctggaatgcgagtgatcgcctctttgcaggtacaaaaatcacggcacagagtaagcaggtcacaggcttgcccagagtctacggctgcaggtgctcaagctaggcctggaaaccaggacctctggttccctctacaccgtgccacgctgtctccttgtctttggtctccaattattgttttcctttgttctgactttatggggagactggcaagagctcttgcaattccctcctgatgttgggagtgttcagattctagccctttccctcttgttctgtttgcctgctcagtagggtcctctcccctatgaatccagcagggtattgacacttccttcatgcttttgtagtggctgatagaattggatgctacctaacgtgttttttttttttttttttttgatcaagaagcaggaaaataaatcagttatctcctattttccttaaaaaacttttaaagccggagaacatttcagtgggagtgagggtcagatttgtgagtaaaaatgtataatagtcttttagaagataagatctgttttgtaaaaaagggaagttccctatggcattgaaaataaagctgccttttggagcagtgctttattttatgtgtaggtttaattaggaagtagcactttgttgtgggaacataatcacagaggggcctttgttttatgcaaacttttagacaagagctgcttgtgtgccgggttttgtgaaacctcattaattcagatgtcagttgttttttcccccaaatttctgaaaaattgaccagtactgggtgaggtttataattatatcattcaaatataaagtgtttattaagcacatcgacaaggtcaacaagaaaatagggaaatttcacattcttaagataaaatctttaaagatttttattgcaagaattgcatctaaattggagcgtctcattacaagtgaattttggctgttcctggaaagagattaggcagaaacccttcctagaagcactcagatagaaattacttttactgtatgctttttgtactctaatgattctattccagttttctattacttcatactggcctccaccaatttcaaatattaaggtttcttgaatttgcttggtaaaataaatagattggaagaagtcttaagctcatcattatgatttggaagtaagccaccctaaattcctgtccttcagacatttttatctttgttgtcatgttctctgtgaagctactagactcagaaataggtcttttgttttcacattttcattatctcgttttattttctcatgcatagcttctctgctggttatctatcgtgtaagaaaccactgtgaaactttatggcttaaaacagcaacattcattttatacctttcctgatttcagtggggtcaggatttaggaaaggcctgagtgggtatgtctaaggctgcagaccatggggggctagacttggagcagcttaggggagaggttctctggggcagctggaggagggggtttggggaagctggggaagagggtgccagaccagctgggagaaggttcctggggcagctggaggctatgttcatgagagttcagggcttctccgtgtggtctttccacatgggtgcctgagcttcctcacagcatggcgactttaaggcagcttgcttatagggcagcttggggcaggaggcagaagttgtgtcccctcttagacctggtctccagtcacacacagtgccagtttccctgtgctgtatgagccacccagtcactcaggttggcagagattcaacttgggaaagatagaccagcctcacctgtcaaccggaggaggggtgaagaatttgaggcctgttttaaaactgctactgcctcagccttctgaaagggtctttctctaggaggctttaatctttgcagccttgcatatcttatcttgtaggggccgcacccctgtctttaggtgaggtgaagagcttataggaaccaaacaggaatgcacatactgttcttttaacgataagtgagctgaataagtgaaaacaattgaggctaggctttaggaacaagatggagttttgtttcttgatacgatttatatttaagctttctcacttatgtattatcggtggggattgccaaacagtccaggataaccattttgccatttggcagagctcagttctctttagattttgagctgccaaggtttggctgcactatttcagtgtttctacccagcagggcttcctgcatttggcctgggaggattcagggaaatccgtgaagacagttttgcaggattggatcacaaaatgcttttcatatccccaactgttttggcatcaaagtaaagatttttgtatatttatgggaataaagggaagtccgttctgaaattatttcttccgttatattgaagctgaaaaaaagggataagttttaatttctcaagaaatatttctttgaaaaatatagtgcagtttggtatccattctagcttttttttctttttatgtattgacttaacttctactcagattgtagtatttccatctttaaaaacaaagctgtaacaacatttttaaaacatggcttataaaaacctcagctaggtctcagaatatctcttgtgtttttaatgtcttcagtgaaccttttctctacacggaacttcctttattttgatgtactagtaacatataatagcagaaagtttttaaactatagaaaaatataagaaaaaagttattttaaaaaatcccctgtgattcttacaatcaggggtgaccttttgctccattgcatcatatctaagaacactgaatatatttaagaaatcacggaatctctgccttgtgcatactgggatctcaggattcatcgatgaacaagacaatgatcggattcacattaagcccttagtgcaaagaaagtggacaacacatgggcggttccttcagtatgttggttattagcagtgatgagcaggcttgctttcattgcatctttaaaggcaggccccagctctcaaggggcttctggtctggtggggaaaaataggcttctgctgagtggtgtagagtgtgcagggaccgggggtgcacagagaacacatcagaaggaccacttcgtggctcagagaaacaatgcaggccgggcgtggtggctcacgcctgtaatcccagcactttgggaagccgaggcaggtggatcacctgaggtcaggagatcaagaccagcctgaccaacatggacaaactctgtctctactaaaaatacaaaattagccaggcatggtggtgcatgcctgtaatgccacctactcaggaggctgagccaggagaatcgcttgaacccagggggcagagtttgcagtgagccaagattgtgccattgcactccagccggggcaacaagagcaaaacgccgtctcaaaaaaaaaataaaaatgcaaaaaggacccactggaggaagggaggcaggaatacagaaggaagaagcagcaggaaagagcagggtgggaaagacctggaaattagaaagcctggcatgtctgtggtgctgacatagtacattcagtcctagaataaacatttcctctcgtttttcttttctatttattgggacataattgacatatagtgaaatgcacagatctcgagtgtatagttcggtgagttttgataaatacagacacttgtataagccattcccttgtcaaggtatagaacgtttgcgtcaccccaaaaggctcccccacccccttcccagccaattccccacttgctctcctccctcccagcagccagaggaaccgctgtcctgaattttttttttcactttggaagagttttgcctgtgagatgacttcttattaatggaatcacagtgcgtccttctttgtgtctggcttctttctgtgagcatgaggtttgtcagattcacatgccgttgcttgtatgagtggcttgttccattcatttctgtgtagtaatttcactttatggatataacaacatttatttatccactgtcttgcggggtatttccagtttttgtctattgtaaaaatgctgctgaaagcaaagcaatcctgggctcttctcccaggagtcactgtcccgtgctgcctgctgtccaatatttgaaacccattctttatatcctgtgtccagagttctagctgttcactggaggagagccaggtggtaccaatttcttcttcctagcgaccagcaaaatgcctgtaacaatttgtaatggcagaatgatattttatcatttggctacacaataattcatttaacctgttcccattgggagacacttaaggtgtttccaatttggggctattctaagttatgctgcaacaaacatttgaatatattatggctgttacggtaatttattttttagtgtcgattccaaaaaattagattatttggttaaatgcttaaatttttaaaaatgtgatctttattgccttatttttttcaaaaacattgctcaatttataggctcagtaacagtgataaagtgtgtttcacaattccttggtagtatagagatcagaattttcttttcttttttttttgtcctatgctaattgaatagcagagaatttatttgtttataatgagttgttacattatgtcactactggacatatctttgggaggactaagctaaattcagatgcttaaacaatgtttggtctgatttattatcttcacatgtgtaaattttatgattattaatctattgaggcagtcaaattgctataacacggtggtgacatttttagatattgaatatcaatattagaggctggacagacttttcaagtcatattctaaccaaagagaaagaaccgatttgactctaagtctcattcttttgagaagttccagttgtcacaagaataactatggaacattggaatattgattaaaaatctgataccttacctctgtattgtgcattttataaagtgctttcctattcattatttcgtcttatgcttacatgaaaaatctgaaacatgtgtcgatttgtatccacgtcattcacgaatatgcactgggatgtagagaatacatcctctggatttgtcgttttaagcctaaatcatggaaaacattcaatgtagttttaaagttctctaggctataggaaattaaaaatatattactcacctatcactacctttttgcaggggaatatgggtgattgtggaattctaactctgaaagcattggttttggtgaggtgaccaggctgccaaagtgcactgaaggtagagacttcttagtgactgggacagctgcctgttgatgccgtgcacctcctcaaacctgtggtctctttgcaatttgtatgcaggcacatagaaagcactgactcgctctggcctgactgtttcggaaatgaagctaggaaaactgtgaggtcaaatttaaacctgcaaataattagctggatggcatagctgtacaaactgagatagcccgggaaatttggtaaagctttaaaactattatacttattcgcttctgttcagccaactgggctgatttttgagacagagtctcactctgtcacccaagctggagtgcaacggtgcgatctcagctcagtgcaatctcagcctcctcctttccagccattcttgtgcctcggcatcccgagtagctgggactacaggtgcgtgccaccacacctggctaatttttgaatttttagtagagatgaggttttgccatctgcccaggctggtctcgaactcctggcctcaagtgataagtaattcacctaccttggcctcccaaagtgctgggattacaggtgtgagccaccatacctggccaacataagctttcttatcagttgagaattactagaatatgtgtaattgttttcttgttttaaaaaataatagactattttttagagaagttttaggtttacagaaaaattgaatgtaaagtacagagaattcccccacacccctctgtacaatagtttttggatcaaattttggctagtggtttttttttttttttttttttgagatagagtctcactctgtcacccaggctggagtgcagtggcgcaatctcagctcactgcaacctccgcctctcgagttcaagccattctcctgcctcagcctcctgagtagctgggactacaggcacgtgccactatgcctggctaattttttgtatttttagtagagacgaggtttcacccttttagccaggatggtcttgatctcctgaccttgtgatccacctgcccccctcccaaagtgctgggattacaggcgtgagccactgcgctcggccttggctattcttaatcacccttttaagagcaagtgactgatccagtgcagttcaacggtttctgagaccttttcctccatagtatttacaagacgatcatgagaattgtcaatcatataatttaagaatttttgcttttcctactatttaatggtatgtaatcagaagatatttatccgtgttcttcatatgaaggaagcacaaaaaatgtcagttaaataaccacttagtaggtctctagtgggatgaacaatatttaggatcatttacaactttataccagtcttgtatcagtcttatagactgagccaggcaagaaatggggctgcccgaacttgctgttcaggaaatgccaccaaggaggaaagcattgtgtgaacaatgggtctttcactgtaaagccctgagtttggggctctgattttgtattttgtgaagtatcatcatgccttgccagagctcagtaagaatgtgaccgaaatcaggtcatgagaaagataagatttcaaacatcccctcggagctgtttgcttgacctccgctgacttaattggtttctgtggagttggcccctgcctagaaatactacattcctactcattttcaacttagacagctcagtctttcacaaggttgaatcttcataccattcacttttcatctcttttttttggagggggtgttgttataaaatatgcatatcataaaatttaccattgtaacttttttttgtataaaaacggcatattctctattttgcatactttaatttcagaacaaaataaacaaaaaaaatccacaatacacaacatccaatcctgctgtcagagtagggagggaatgggggcttgacacccttgtttcctgccttcaatacaaagacaggagagaaaaaaacactagacatcagcagggggagccaggtgggacaggggcacttgaggctgcagtgggagccattttaaccatttttaagtgtacagtacagtggcattaggtatattgtgcaaccatcaccaccatccatccccagaactttttcatcttcccaaacagaaactctgtaccccttaaacaccaactccacgttcctctcttcccccagccctgggtagcctccattcagcttttgtctatgaatttgattactctgggtaatcaagcttacataagtggaatcatattctatttgtccttttgtctggcttatttcacttagcgtacataatgtcctcaaggtttatctatgttgtagcatgtattacaatttccttccttttaaagactgaataatattccattgtatgcatagaccatattttgtttagccattcatccatcgacgggtacctgggctgtttccaccttttagctattgtgaatgctgctgtgaacattggtgtacatgtgtgtttgagtccctgctttctcttcttctggatatatacctggaagaggaatttctgcatcatgttgtaattctatgtttaattttttgagggaccaccatactgttttccatagtacctgcaccattttacattcccacagcatcttttaaaaaaataaacaaaagccttcctatatattatgtatcctacatatttggctattctcttttaaaaaataagctttaaatattatgatttgtcagttagatactcaatgaagttagatgtgtctaaagaaaaaggagaatcttcaagtagaatatagaccaaggatccatacaaaaagtgaaattttacacactcacaaaaagcaatactttctcatctctctagtgctaaaactatcaacgattcagctagatttagggcccgaaggaaagaaaacacataattattgtttctgggtgttgtaaatgtataactaataggttaatgtttaatggagttcgttaagtacagatttgcacagcttttctgggcagtatcacctgttggattttagaggcttaatgattaagggccccttttactgtcattgggtgtgatgctcgtgtgttttctcataataaggcatgagaagaagggatgcaagctgtaagctcttcaccatcgctccatcaactggggcaaaaacaggtcaatgtgaggactaggagaagaggtgaaaagacgttgaatttttagccagatattctctgggactgaggcaagaggggggaagtgtgggctttggggccatgtaggagagaactctgcactcttcctatagtggagagagggatctgatcgagctggaagaccctgcttggcctctttgtgttttccttctcactcatgttttggccttttagaaaaccctgtaagacccattgcttttatctctgctctggtctcttggtgtttacaaagtcagcaccaccatctctcatgatttccaggcaccaacatccaatcctgtgaccttcagccccggtgaccctgtagctccttggtttcaggccctgggatggtctaagggttttaaccacggtgcacaaagatctgcctgatggccgacagccctggccaggcgcccaccggctctctcctgccatctctgcactccttcctctgtgctctgccctcagagttcccctcagtgtctttcctcacctttgctccagttacctggacatctctcatctggcttcagagataccttctcttaccttcagggaagacttccctgactatctgccttctccagacttaatgggccttcccccaacacccagacactctcacagcctccacccttctccctggtgacttggtcagcctctggctttcccaccagggcattgggtcacatagaccttccatccactgccatatttgtggcacctggtttagtccctgtgacaaagcagatgctcagttaatgatgactggacgaagcttcagtgaaaaattgttagtgggcgtcccttgtccccagtgtcctgtgtccatgtggagtgttcctttgcttacccctcccccacctgtcctcaagggaggagcagtcattgcctaactcggggacagctgactctctcccccagggcacagtgtgctcttcttttcccgtgcaggctgttctcagacgcacaggtactggcccacaggacagagcttccagggtgggtccgcaggcacccactcaggctgtgacgcaggagggagtgtgtcaagcaggcctccaccgcgcccatctacatcatatcctccagttttgcttttttatggaaaattgcagactgccttttccaatctccatgacagatttgtgagcctacttccacatcagaagaggaaggaagggatgccattcattgccaccactgtcccaacatgaacaaatggggaacagcattttggagaaagcctagtgtgatttcaaaggcttagatggtcctaggtgaaaacttgatagttaacggccaagggaatcattaggggttggggaatagaaaaggtgctttttggatttcttgggtctgagaatggcctgtaactgcatttcacaagtgggtttatatcattctaggggcacttggctgtcacgtggatcttacaaggtggggaaaagaaatgaagatcctcacaaagagcatttggtgacatgcctggctgtggttttgaggctgttccagctaattttccacaaatttagcaaaatcaccaagaacacctcgtcaacttgagcaacaggaacaattatagggagaaatacatcgagactaggaatggaagacaaccttttacttgtctgttctgtttcttagataaagcagttcaacactttttgtgggggatgagggacagggtcttgctctgtcatccaggctggagtgcagtggcaccatcacggctcactgcagcctcgacctgccaggctcaagtgatcctcccacttcagcctctccatggctgggaccaaaggcatgcaccaccatgcctggatgattttttttgtagtttttgcagagatgaggttttgccgtgttgcccaggctggtctcaaatttctgggctcaagcagtctgcccaccttggcctcccaaagtgctgggattacaggcatgagccaccacccccagcctgcacactttttaaaacaacaatactattagtcaccctcaaatggaaatggtgacacctggaccatgggtcagcttgcggggtgggctccttttgaaatcgcttttctaattgatggaagtcagaactgcttctgacaggtgtttgaagtatttctttcctatcttcagattaccgatcatgggttactatttacgttttaaatcggctcgtatctgtgtgccctctatttgtcagcaatcatctctcttactttggcttttcttcaatgtccactttaagtatctcagcatggttctgaagggagcattcctagattgtctgagacatgaattttaagaattttaaggaaagaaatctgcttgatctaaatttatcactattggcagcctgtccctcctcccctaatcaaaacaaaaagcaaaaagaaaaggagcaaaaaagagaaaagttactggacaaggacatattttgttttgttttaattttgggacatgtttattttgcacatctaatggtagcatcaaatttaaagagaaacaaatcacgttttattctgaaatgttcttcttgtttatgaagctgtttctttttgtctgttaattgagtatgctgctcctaaaatgagataacagttaaaactgccaactgaaatataatataaatgacatttcaagtaattgctctgagaaatgtatttaaaatgtgtattgcagacatccttccttccctctcagctccctagcatctcagtttttcctagtttttgttgccacttcacgtgctgataattgactaagtgctttcgtgattgacacgctataaaactggaagtgagccatatctgcattagtaattagcctcctattaaatcactgcttctttattcatgagtagtaagtgttaaattcaaatggtcattttacatttcattctctaataatttcatgagacataaatctcacagagcacaaaatcgccactttcacagggataattgagcaatattatttatcaaatgcacttaactgttcatctaaatctcttttgtctgggaaaagttcatttccttcatgcaagagagaaaacatgccttcattcactgttcagttaccaccgtggaggcaggtaggttcttctatggagaattttcagaccggagtcatgcctggtattgagccccatagatttcctgagagcctgcggagaacagctgcactttctgtggagaggagaggcttcacttctgtctgcacatgggaagttgacctctgatgctggaaaattaggttatctgtattttttagacatctgtgcctgagatggatttaatatatttaagttaagattgaggcccacatgaacattcctgtctggattcctttttagaaagtggcgtttgatgtgtgcctactttatttatgtgacactgtttatgtgcattccagtgatcattaacaaaggctacttggtggaaaatcgtgatgaaagtggatttaaaaatggctgtatcagccgcaggtttagcaagactacattgactctgagtctagtgagaacccctgcatcatcaatttgtgttcagccaaccttaaatccagagaaaaggcagtttagtcaaccatgcaaaaaaagggcaaaagaaatattgtggactttattgggacaagggtttaatattctatgtactggccaggcacagtggctcatgcctgtaatcccagcactttgggaggccgaggcaggtggatcacctgaggttaggagttcgaggccatcctggccaatgtggtgaaacctcgtctctactaaaaatacaaaaattagttgggcatggtggcgggtgcctgtaatcccagctacttgggaggctgaggcaggagaatcgcttgaacccaggaggcagaggttgcagtgagtcgagattgcgccattgcactccagcctgggcaacaagagagaaactttgtctcaaaaagaaaaaaaaaatctacatactaacagacaatccttcagtttttctacattacatataagaccaatttgtcaacacatgattggtgaattcggcctgtattaatcaggtgagactgctgtaacaagtagcaccaactgggcagcttaagcaagagacattgatgtcctcacagttctggaggctgagtctaaggtcaaggtgtcagcagagttggtttcttctggctcatagtggcttcttctccctgagtcctcacatggtcttccctctgtactgtctgtgtcctaatctgcttttcttatgacaccagaaatattcaaatagggcccactacaatggcctcatttaacttaatcacctctttaaagagcctattgccagatacagccatattctgagctactggaagttaaaacttcatgtatgacttctgcgggaaacagttcagcccataacagggcaaagtgaagacaaattgtatttaggttcttcatagcaccctttgcctgtttatcagacttaccactctcaggacccctagtttgtttcctggtctccagtttggggaccttgaggactattgagagattgtgggaacaatggcccaacatcctaaggaagtctttgatcaagataaaagttaagtaactcctcccttgagagcttgtcctgaagtttttcactatggctgttcttccatttggtatcattttcttatatatgactaagctctcagaataaaagctggcaaaaggttggtaaaatactggaacatggtattgaaataattatgtgctgggccaggcgcggtggctcatgcctgtaatcctagcactttgggaggctgagatgggtggatcacaaggtcaggagttcaagaccagcctggccaagttggtgaaaccctgtctctactaaaaaaaaaaaattaaaaaatattggccgggcgtggtggcaagtgcctataatcccagctactcgggaggctgaggcaggagaaccgcttgaacccaggaggtggaggttgcagtgagcggagatcacaccactgcactccaacctgggtaacagagtgagactctgtctcaaaaaaaaaaaaaaaagaaagaaataattttgggctggatgcggtggttcacatctgtaatcacggcactttgggaggccaaggtgggtggatcacttgagcccaagagttcaagaccagcctgggcaacatagtgagaccccgtgaccatgaagaaaattgaaaaaaatcagccaggcatggtgtggcttgtctgcggttccagagatttgggaggctgaggtaggagaatctcttgagcccaggaggtcaaggctgtagtgagctgtgaccacgccattgcactccagcctgggtgatagagtgagatcctatctcaaaaaaaaaaaaaaaaaaaaaaaagaaagaaaagaaaagaaagaaagaaatgacactggttaaagtgaaagggtggaaaaactggattagggcttatcagttgtctcagcctgggacttctttccttttctttgcaatatatagaagtagtgcagcatagtgcttaagagtacaaactgcctgggttcaatccctgctgtatacagtttagcacctgtaagatcctgggaagattacctaacctttctgtgctccaatttcctcatctgtaatggggggaaatgacagtacttacttcgtaagaagaatgttgttgtaagaattcagagttgttggggcatggtgcctcatgtctttaatcccagcagtttgggaggcatggatcatttgaggtcaggagtttgagaccagcctggccaatatggtaaaacctcatctctactaaaaatacaaaaattagctggacatggtggtgtgcaccagtaatcccagctactccggaggctgaggcaggagaatcaattaaacccaagaggcggaggttgcagtgagccaagatcatgccactgcactccagtctgggagacagagagagacactgtctcaaaaaaaaaaaaaaaaattcaaagcgttaataatcctgatgaagcacgtggcattggtactggccacagtaagtgcttcgtggcattagcattcattaatctttgtttcttgcacactctccatcctgttcccccacccaacagaataactggaagagctgccactatgcttaacatatgaacccggtctccaagtgaatgtaggaatctttttgtttgtttgtttcttggcattacaaaaataaagttcagtgaccctaggtgtgtgtggacatttgggggcaggcagcacgcagggtggcagaagggttctggagctgacaccacctggtttcttttgggacctgcaactcagtagtttgtttcttgacctctctcttcatcagtttccaaatgtataaaatgggcacaaaaacaataatgggattgtttgggattaaatgtgatgatatatgtataaagctcttaacacgcacgtggtaaacttgttagttctttccatattcaagtgtgaaactggaagacaaagtaattacattctgtttcagatgtctttgtaaatgaccttgccttctctccctccccaatgggctgcctgatcaccctggctcatgtggcgcctctgcttcgtgaagtcaagtttcacaggtgcagcagtaatggatgatcacaacccacatattcagttcaacttttatgatgcaaacatttacaaaacagttggacagtgatgagtagctatgaggatgttctccgttgtcctccttgtcaaagccccgaacacattatttcacttctctttttttttttttttggagacagagtctcacactgtcgcccaggctgaagtgcagtggtgcaagctccactcactgcaagctccccctcctgggttcacgccattctcctgcctcagcttctcgagtagctgggactacaggcgtccgccaccacgcccagctaattttttgtatttttagtggagacggggtttcnntgtgntagccaggatggtctcgatctcctgacctcgtgatccgccctcctcggcctcccaaaatgctgggattatttcgcttctgatgtgctttagaaacagccattgtcttcgaaaggaaagtagctcatgctcagagatagccaaaacatctgacacgctgaaatcactcgcagactgaagtcgattggagaatgtttctggcaggtggaaagagtgactataatgagatagaattgttagtccttattgattctgtggaattccagaatcagggaaaagaaaaacaaagaaataaaacccaagaaaatccaggcaataagactcagtaaattaacaacttccttcccaagacatacacatatatgtgtatgtgtgtgtacgtgggtaaatttttttttttttttttttttgagatggagtttcactctgtcacccaggctgggagtgcagtggtgcgatcttggctcactgcaacctctgcctcccgggttcaagcaattttctggcctcagcctcccaattagctgggattacaggcatgtgccactacacccagctaatttttgtatttttttagtagagatggggtttcaccatgttggccaggctggtctcgaactcctgacctcgagtgatctgcccgccttggcctcctaaagtgctgggattccaggcatgagccaccgctcctggcctaaatttttatatatacatatatatatttacacacacacacacacacacagctgacccttgaataacttgagggttgggagtgccaactcccaatgcagtcaaaaaatccatgaataacatttgacttcggtaaaagacttaactactaatagcctattattgacttgaagccttgctgataacataaacagttaccacatattttatgtgttgtatgtattgtattatgtattatatatgtatttatgtgttgtatgtttatggtataaagtaagctagagaaaagaattgttattaaaattgtaaggaagagacaatactatatttactattcattaagtggacgtggatccatcaaggtcctcatccttgtcgtcttcacattgagtaggctgaggaggaggaggaagaggggttggttttgctgtctcaggggtggcagaagcacacaaaaaaattagtttataagtggacctatgtggtttaaacccgtgttcttcaagggtcaactgtacacacacacacgtttagaggtccatttacacacatgtattgcatggctattttacaaattaaaagtactggacttggtttttaaacaaatcacccatatccatccaggttagaggaagtctggagtcagtagcagttcacctggagaaaggcattttttgtgttttgttgcttgttaccccaacctgagttagtaatctaagtttactctcagaaaagtgaatgcttgctaaggctgaataactaaaataggggtgtgatattttcactacgttcttcacaattcagaaaacatttagagttctctattcaattcctgggagccacattttaaaataaagttgtgtccagagccttatgacaaggcaaggatgtcttgttaaatgatgaatgttttcaggaaaccagaatattgaggataaaaacgagagattctggaggtgatatatgatagttatgttcagatacttgaaggacagttacatgaaagtggaatccaagatcttttctgcagctccagcatgtcgaatattatgggggagcttgaatcaatgtaaaaaaagattatctggccaggcacggtggctcaaggctgtaatccaagcactttgggaggtcaaggtgggcagaccacttgagcccaggagtttgagaccagcctaggcaacatagcgagaccctgtcacacaaaaaaatacaaaaattagccaggtgtggtgctgcatgccactctggaggccgaggtgggaggatcccttgagcccaggaggttgggactgcagtgagctgatatcgtgccattgcactccagcagcctgggcaacagagtgagaccttgtctcaaaaaaaaaaaaaaatcctctaatgagggagttgtcataaaacaaaaggactgtcttaggagctaatgaatttcctgtcactggaagtacttggagaaggcctggggtttttggggagataattccttctcagttttagattttgggctagatatctaccagggtcccttccaaatccaggatttgtctggctagtttcctcctgctgctaatagtcatctacattcatttttttcccccagtttgtttcctcattactctggcttttaatttttttcaattaatagacgtttttggaacagttttcagtttatagaaaaatgagcagaaagtacgaagttccatactcctcactctctcccttccctccagttgctcccactattaccatgttgcattaggatggtacatttgttatcattgatgagacaatattgatgcattattattgttgagtccatagtttacatgagggttccctcttggtgttgtacattctgtgtgtttagacaaatgtgtaatgacacgttcccaccattagagtatcatacagggtggtttcactgccctaaaaatctcctgtgctccacctatttatccctccttccctcgccctgagacgctggcagccactgatctttttgctgtcttcatagtttcgcctttgtcacagtgtcatacagttggaatcatatagtacgtagccttttcagattggcttctttcacttagtaatatgcatttgtttgtttgtttatttatttatttattatttttgagacagagtcttgctctgttgcccaggctggagtgcagtggcacgatctcggctcactgcaacctccgcctcctgggttcaagcgattctcctgactcagcctcccgagtagttggactacaggcatgcaccaccatacctggataatttttttgtatttttagtagagatggggtttcactgtgttagccaggatggtctcgatctcctgacctcatgattcactctcagcctcccaaagtgctgggattacagacgtgagccaccatgcccagtctatttatttattttttgagacagagtttctctcttgttgcccaggctggagtgcaatggttcagtctcagctcactgcaacctctgcctcccaggttcaagcgattctcctgcctcagcctcaaaagtagctgggattacatgcatgcgcctccacagctggctaatttttttgtatttagtagaggtgtggtttcaccatgttggtcaggctggtctcgaactcctgacctcagctgatctgcctgcctcggcctccgaaagtgctgggattacaggtgtgagccatggtgcccagccattttttttttttttgatacagagtctcactctatagcccaagctgcagtgcagtggtgcaatctcagctccctgtaacctctgcttctggggctcaagtgattctcgtgactcagcctcctgagtagtggggattgcaggcgcctgccaccacacgcagctaatttttttgtattttagtagagatgggattttaccatgttgccctgggtgttctcaaactcctgggctcaggcgatccaccagctttggcctcccaaagtgctgggattacagacatgaaccactgcacccagccagtaatatgcattcgaggtttcttcatgtctttttgtggcttgagaattcatttctttttatcgtaatattccatggtctgcatgcaccatagcatgtgtttctatttacctattaaaggacatcttggttgcttccaagttttggcaatggtggtgcaagtttttctgtggacctaagttttcagttcatttgggtgaattcccaggagcatgattgctgagtatggtgagcatttttattactgagaatggtgagcatgtttagttttgtaagaaactgccaaactattttccaaagtggctgtaccattttgcattcacaccagaaatgaatgagagttcctgttgctccacatcctcaccagcatttggtgttgtcagtgttttggattttagccatgctgtagatgtgtagtgggctgacttttttctcaattttagatgtgttatctccaaatcactatgaaaaatacttttaacactactattaatgtaacataacactagtatctttcaagatccaaataaagacattggaaaccagaacaagctcttatgttcatatcaatattgttaataataataatactacatatttatttgtgagtactttttgagtttattctgaaaacaaatgctgctaggagattattcacaagacacatttctgattaacatgtatgagcagttatactccaaagcttcgattttggcaaccaatgtttaccagttctctcaaggtgcacttttgtttttgaacagttgctactgattctatttttttaaaaaattattgtgtatatttaaggtgtacaacttgatttgatatacatatgcaatgtgaaagaatcatcacaatccagataattaatatatttatcacttcacatagttacccttttgtgtatatgatgagcatacttaagatctacccttttaataaataaatttctagtatacagtacactattgttaccatccattatatctccagaacttattcatcttgcataactgagacttggtatgcattaaccaccatctccctattcccctctcctcgcacctcatggcatccaccattctactgtctgattctaagttcaactatcttagattctgcctttaagttagatcatgcagtagctctcattctgtgcctggcttgtattgattctggattgagacttttcagtgtctttgtttcaggtctttcaagttgcatatgtcatcattaaagctgccaatgcccctcgacctggaaactggattttggagcgttctctggatggcaccacgttcagcccctggcagtattatgcagtcagcgactcagagtgtttgtctcgttacaatataactccaagacgagggccacccacctacagggctgatgatgaagtgatctgcacctcctattattccagattggtgccacttgagcatggagaggtaggtatggtgcccgctgcagcaagatctgtttcctcatcagagtctccctgtctcagatgttaagacagccattgtcatggccaacattaaagactcaaaattgatctctctcaatacaaagatctttaatataactatctagctctatttaaagtggccttgagtcatgtctattataagtaatttcacgaacaatatggtttaccttgttgacttcctctcttcaaggaggctctcagtcttcactctgctgtgatttaatgacgcccttggatcctccttcagagcatcttccccacagcaccagggcaagaatgtttgttgaaatattagagagctaaaatgtcccccaaagttgtagttcccttttctcagtgttctcctcggtaggtggtgagcactggagactcttgaagtcttgcagcttagtgcccaacatgcccagattgtatacacttccttaaagtcagagtataatgagaaacagcccattctttagtagcacctggcttgatgagatgaaactacaaaaattctccagtgctcttcacagcgggaactctgcagcgagctgtgagttgtttcaagggcagagattaattaagacagcctgtatcattcaggctttgtggactttttctttgttcttctcgaagcctattcatacataacattttaaatttgcttcagagaagttgtagcccagggacagatgctgaaatattctaaccacttggagagaaacggtcctcttaaaagattttcagcaataatgccataatgtgatgaatgccggagtctttgttcttcacattgtagtctggttccacatctgatctttggcaagtgagggttttcttttatatcaaattttaaagtttgagacataatttacattcaggaaaacatacagattttaagtatatagtatatctgagacagtgaaatagataccttcaataaactgaagacattgagatcatggtaattcacaagtaattaacaaatgttagacatatttttacaagaagctagttgttttgttttgattttagatggtatctctaaaagattctgtcctgacattaggcaatcagggctatatttttgcatgcttaaaattgacatttgtggccaggtatggtggctcatgcctataatcccagcattttgggaggccaaggcaggcggatcacctgaggtcaggagttcaagaccaacctggtgaatatagtgaaaccctgtctgtactaaaaatacaaaaattagctgggcgtggtggtgcacacctatagtcccagctactcgggaggctgaggcaggagaattgcttgaacctgggaggtagaggttacagtgagccaagatcgtgccactgcactccagcctggaccacagagcgagacgccgtctcaaaaataaataaataaataaacagttgatattcgtctattttgatgccttcatcttcagattcatacatcactcatcaatggcagaccaagcgctgacgatctttcacccaagttgttggaattcacttctgcacgatatattcgccttcgcttacaacgcattagaacactcaatgcagatctcatgacccttagccaccgggaacctaaagaactggatcctattgttaccagacgcgtgagtatgggacggcagtcctgccaaataaaataaaaagattcattttatttaaaggaactattatttttcttctttcctttttggttgttctttcccccacatgttggccttttttcttgccagcagctgtatccttatttcatgtaagattgctatgttgttacagatgctgcctttaggtgatgggccaaaatcatatcctcaggtccctcacccaccccgtccccatagtgccgtaatgtggtgaatgtcatggtctttgttcttcacatcatagtctggttccacatctgatcttcagcaactgaggattttctttcatatcaaattttaaagtttgagacataatttacattcaggaaagcgtacagattttaagtatgtagttaagtgtgtaagactggtgtcgcaaaaattttcatatcccttcaataacccaggagtgggattactaagttatagggtagctggatgtttacctttttaagaaaatactaaacatataaaaagtagttgtatccagctgggtgttgtggctcacttgtgtaatcccaacactttgggaggctgaaatgggagggtcagtggagcctgggagtttgggaccagcctgggcaatagagtgagacctcaactctgtttaaaaaataaaaataaaagtagttgtatccgtttttgtagtctgaccagcaatgtgtgagagttctggcagcactacacactgttagatatttactgctatcagtcatttttatgctggctgttcctgtgtgcgtgtattggcattttgtgatgttaatttgtgtttctctgctgactaatgttgacagtgtgcttactagtatacgatcagatttttttttgtccatttttaaattggacaaaaaataagcctcgttactgacttataaaagaattttatatattttgtatacgaatccttcatgagatatgtatatattgcaaacatatccgttctacttggtgtttgcttattcaccttcctgtgactttggatgagcagaggttttgtgacgaatcccaatttaccattttttcttttatggttaatgctttctatgacctcaaaaaatattagcttatcccaaatttaccaagatatcatggtaggctttcttttagtagctgtatagttttagcttttacatctataattcattttgtattaatttttgtgattggtgtgagggaggagtcagagttttttttgtttttgtttttttttcctatatgtatatgcaattgttctagcaccatttgttgagaatgctttacttgttttggggccgttgttgaaaactattcaaccttattattgtgggtttatttctggactctctactattctatagatctgtttgtctattcttgtgccaataacaagctttcttggttactgtagctttacagtaggtcttgagaggtcaggtttcttgtatttccttatgaattttagaatcagtttgttaatttctgcaaaaaaaaaataaagcctgctaagattttcactgggattccattgattctttagaccaatttgggaagaattttagaagacattttaacaatgttgagtcatccaatctgtgcacctgatatataacttttcacttatctaaatcttctttaattctctttggcagagttttattgtttatttgaaaaggtcttgttcaatagtgctcaacaatgttcaataatgaaaaaagaaggccgggcacagtggctcatgctgtaatcccagcactttgggaggccgaggcgggtggatcacgaggtcaggagatcaagaccatcctggctaacacggtgaaaccccgtctctactaaaaatacaaaaattagctgggcgtggtggcgcatacctgtaatcccagctactcaggaggctgaggcaggagaatagcttgaacccaggaggtagaggttgcagagagccgagatcacgccattgcactccagcctgggtgatagaccgagactctgtctcaaaaaaaaaaaaaaaaagaaatcaaggcacacatagtaagactaaactgttattatttgtagatgacatgattatgtatgtagaaaagctacaaagcaactaccagaaataacaagtgaatttagcagtgttgcagtatacaaaatcaatgaacaaaaatgaatcacatttttagtcactagcaatgaacagtggaaaatgaaatctaaaaagtagtctattaacaccaacatgtaaaaacatagagaactggtgagtgcattgcttcagaggaaagcactttgttctgttaatgtgatttacatttcttgatttttgtgtggtagattaactttgcattctagggtaactcttacttgttcatgatcttttctatagagtgctgtattcaattagccaattattttacggttttcaataatgagttttgaaacattactgacttggtttaagatgcagttggggaattcttttagacttctctgggttctgatgagctaatttgaacctaatttattttaattgagcacaggattctttgtgcatgaaatataatttttaaatgtacatgtaattatattttagattaccaataaaaactcttaaactacatgagatatttgttggtgtgccgacattttcatttcactgaaatctaggttttaatttttgttcataactttctttttccttagtattattattcaataaaggacatctctgttggaggcatgtgtatctgctatggccatgctagtagctgcccatgggatgaaactacgaaggtgagttctagtattttacattttactaaaacttcaaaacagaaattgtagctataatatttgcattactgttttttattccaaacaaacatgaaaggtataaaattatgctccaaaaaaacagattttcagaaatttaacttgtgtcatttttaaacaatttcattttgctttggaggatatgtttctaattaagttcttacaatgatttttttatgtgataaaatatccctaacataaagtttaccgtttgaaagtgtacagttcagtggccttattaattttgaagcccttctgtctgtaagaaagtaaaaaaaaaaaagtgcaattataaattatgtttacattttttagaagaaaggtgttctcttcctattttctccccttccatttttttggtgctaaatcaagatttaaaaggggcatggtggcttacacctgtaatcccagcactttgggaggcagaggcgggtggatcacttgaggctaggaatttgagaccagtctggccaacatggcaaaaccccatctttgctgaaaatacaaaaattagtggggcgtggtggtatgcacctatagtcccagctactggagaggttgaggcaggagaatggcttgaactcgggaggtggaggttgcagtgagctgaggtcatgctgccgcactccagcctgggtgacagagcgagactctgtctcaataaaaaaattttaaaaaatgatttaacagtttatctcttttaacattacattaaatgaataatatgacatcttctccttttattttttaaattttttatttatttagagacagagttttgctcttgttgtccatgctggagtgcagtggtgcaatctcggctcactgcaacctccgcatcctgggttcaagggattatcttgcttcagcctcctgagtagctgggattacaggcacatgccaccacgcccagctaattttttgtatttttagtagagatggggtttcaccatgttggccaggctggtcctgacatcttcccttttaaaacgcttgcatgaagttacttcttattttcttctaatctttgtaattctttacctcttgaataggactattctgttatcgatgctgaaaaatctgtagatgaacactaagaaaattattaatagaagcttctaaacccttaataagttccatgtatcttttttaaaaaagtttttattagctaagtcgtattctggttttgctttattcctcttcgtttctatttgtaaccaggttatttgtatatattggcatctaaaaattaaatgccagtttgctttgatgataatcatatatcctctgttgtgaggttcttgccacatatttgacagataggttctttttatcatgaaattaagaaaaataagcagatacattttctaattcagttttggcttccttattgtgtagaaactgcagtgtcaatgtgagcataatacttgcggggagagctgtaacaggtgctgtcctgggtaccatcagcagccctggaggccaggaaccgtgtcctccggcaatacatgtgaaggtcagtatacttagaatctgaaggtcagtacagttttcctcttaatacgtccaagtttatggtgtcttaacaacttttatagttagcaggtaacttgttttcttagaaatttcagtagtttccaaagctgcagattatcttaaaattttaactattgtggcctaaatgtatctttatgggtttgctgttttatctgcaagtcccccttcccgtatagtctattattctgtattaattttacttttgtttttgtttttttaccatgggatatgccaggttgtatattctgtattgatttggatttaagttttaaataagcaatatattcacaagattcctagatctaacaatatgtaaaagtatgtagttaaaagcatgacttccacttcatctccctccttcgcactttttattgttttctagtatgtccttcctaaaattgttatgcatataaagcatacgttaacatatccctccagccaacacagttcttacgcagaagacaatgtactatgcatgccattgtacatatcgcttttttttttttttttttgagacggagtctaactctgtcgcctaggctggagtgcagtggcgcgatctcggctcactgcaacctccgtctcccaggttcatgcttcatgccattctcctgcctcagcctcctgagtagctgggactacaggtgcccaccaccacacccgtctaatttttttgtatttttagtggagacggggtttcaccgtgttagccaggatggtctccatctcttgacctcgtgatccgcccgcctcggcctcccaaagtgctgggattacaggcgtgtgccatggcgcccggcccacatcactttttatatttaacaatgtattgtgaaattctttccatattagcaattagaaatgctgtttttaaaaacaattgcacagaattccattatacaaatgtagtataatttattaaacaaccacctatcggtggttattttgatggttattagtctgttgtccacacaaacaatggtgcagtgattaaccctgtatgtgtccttctcaagtgggcaagtacttctgcaaaatataatcccaggagatggtttgctgggtcaaatgggtatgtgcatttattattttgatattaatagctcttcccaattgtcctccataatattgcccatatcttattaaaattacttattctaggattttaatttaatctaaaatcatagaacttacttagggaggttaagagttttctttgtataaggcatgctatgtaaattaattgagatgttaaaaatattctcctagcatgtaattgtcacaataaagccaaagactgttactatgatgaaagtgttgcaaagcagaagaaaagtttgaatactgctggacagttcagaggaggaggggtttgcataaattgcttgcagaacaccgtgggaatcaactgtgaaacctgtattgatggatattatagaccacacaaagtaagagtatttctttgccattgctgatcttcatcatcttcaccaggtggaaaagagactttgtcaagtcttaacctctgtatgggagacttttgtaatatttcatttatatccttgttatgccggtagtgtttttatatatatatttcctactctatcctgcttttcttgctccaaataagatgtcagtcattgttatttatcttgaattcaggggtccattagctatgtaatcctgggtcataatactaactacagatgtgaaaattcagctataactaaagcagctgtctcttgcctgtaggagatgttcagccaatctttttttttaatttttattttttgggacggagtctcgctctgtcgccaggctggagtgcagtggtgcgatctcggctcactgcaacctccacctcccgggttcaagcgattctcctgcctcagcctcccgagtagctgggattacaggcccatgccaccacacccagctaatttttgtatttttagtagagacagggtttcaccatgtcggccaggatggtctcaatcccttgaccttgtgatccgcctgccttggcctcccaaagtgctgggattacagatgtgagccaccgcgcctggccgtgttcagccaatctttaattgacttgatatgtagttcttacatgagtccttgtggtgtcctggttataacgtggctctgagagacagcagcgcgaagggggctggatagcagggataatagaaaaagatggcactttgctaatggtactaactactgcgaccatcaaaaagatgtttgggcttcctggcttgggatcacctcatcttcctcaaacctaacccccacccccatgcacaaaatcatcgtaatagtcccatcttgagtaaaaagccaataccttcttatttatactattgccaacattgctgttatttttagtaagagaatccagggcaacctctgcctttcaggtgtctccttatgaggatgagccttgccgcccctgtaactgtgaccctgtggggtccctcagttctgtctgtattaaggatgacctccattctgacttacacaatggtaagtacttgattcacttttgtgcttgtaattgattttgtgtgtgtgtggaagatttgcacatactggaactattaccatgatatagccagttggtaacatgattattgattcttttgttcaccaagtatgtatcaagcacctactatgtgtcaggcagtttttgaggacctgggaatgtgtacttaacaaggtagtcaaagtcctttctcacaaaaacactaaacaaataggtacatgggtaatataatgccaggtcgagaggtagtgtcatggacataaagcaaaattaggactcatgaatggagggagatggggtaatgaggtgacaatgttggggtgatgaaatgacatttgagcagataattgagcatttggtgaaggaagaaataaggcccagtttaaagccatgcgtggaacacagtaaatagcaattgctctccttagcttttagaagacattcggagggcttttgcatacatcatctcacagatcaagcaagtcctcccgttaacttggtaaatgtcagagttctttctttcagtttcaaaaactggcaaattgacttgcaaataccagagtctcctgaataggttgcgtctgttcaaagactcttgtgaccccatcaagttctcagccactggcagttaaaatggatatcgagcagtagggatgagtgggcccgccagcgatggggagggtaaattacccaactgaattgattcttacgtgcacctggtgaggggatgatgatgataataatgaagatgatggtggtgatagtggtggtgacatttaccctcaattgagttcatttaaaaaaatatatcatttaaactttgcaaccatagcagatagaaattacttaacccactttgctgtagctcagagcagtcaagaaggttaactgcctgaaggtttcaaaaccgacattaaaagcaaagatagtgcttgctgctctctgccacttgcctctgtgctttttttttttacaaaacagttttataatttacaatgatacagttctcccatttgaagtctacaattcattgttttggtgtattggtgcaaccatcaccacaatctaagagtcgaacattttcatcatcccataaagaagccccttacaaactagctgtcacttcttactttcctccagccccttctcccggcccctggcaatcgttaattagctttttctttgcagatttacctattctgaatattacatagaaatggaaccaaatatgttggtttttggtgactggcttctttcatttagtataatgttttcaaggtcatccgtgttgtaccacgtatcagtatttcaaccctttttattaccaaataatatttcatagtatggacataccatgtttcatatatccattcatcagttgatgaacatttgaattgtttctactttggggccattatgaacaatgctactagggacttttgtgggtgtatgttttcattattttattgggtgtttacttaggagtgcagttgctggatcttatggcaactctatacttaacattttgaagaagtgtcaaaaggttttccaaagtcactctaccattttatattcccagctccctccatgggtttcatctctgttttctttctttaaacaaggaattggcaaactatggcccatgggccaaatccagcacactgtctgttcttatgaataaagttttattggaacggagatatagccatttgcctgtgtattctctatggctgtgttcaaacaataacggctgagccgagcagctgcaaatgagactctgaggccaaaaagcctaaaatagacaccctctgaccctttacagaaaacgtttgccaacccctgctttaaacctctgttgccttcatgttgggtcattgccattgttgtctttctagggaagcggccaggtcagtgcccatgtaaggaaggttatacaggagaaaaatgtgatcgctgccaacttggctataaggattacccgacctgtgtctcctgtgggtgcaacccagtgggcagtgccagtgatgagccctgcacagggccctgtgtttgtaaggtaagtggggaggtcagagacacccctgagcttcctttgagcttctctggaaaaggagtgttttccattggctccaatgatcagttcttgagcaaagtggtaaggtttaagcagaactccccttgccccttctctccaagccacaccgagttggctgtattatatatgcttggactcacatgggcatctggcttgctttttttgtacctctggtaatggtgatatattccagaggcatttctgtgacttcttagaggacaccaaacactgcatacctttatattcccacctcctctgtgggcctcatctctgttttctttctttaaaccaggacttggtaaactatggctcgtgggccaaatctgacacactgcctgttttgtgaataaagttttattggaacagagctgtatccatttgcttatgtattttctatgactatgttcaaccaataaaggctgagttgagtagttgcaaaagagatgctgttgacccctagcttaattctatggtattcttttccagctttgtattcggaagagaaccagattaacattaaatttctgagaacaccaattaaacgcagatatgctattttgagtgtctcttaaaaaggagttgaatagtcataagaaatgcattaatatggtgccagtgaggggttttatttggccttacagtattaataacaatttcttcataattcataggacattccattgtacctatgtgcttattcccacctgtgcagtcttaggcacatgttatatactactggaaataatcttgagcatttatgaatacgagaaaattctatagctctcttcagattttgaaatgctggcaagatcagtaaaaaatgaaagatttaaaacaaaacaaaacaatttaaatggaatgaccaagttctaagatctccagccttgttcttgagtacaaaatcaaattatatataattcaaaatctctattctggaaatattgactttatgaggcctcacctttactttggacgtttattcacctgtctctgtggatcaccgaacacctatcttgttaatgtcattttattctctctggacagacacattggtttcaaaagctaatcttttaccctaacttacaggaaaacgttgaggggaaggcctgtgatcgctgcaagccaggattctataacttgaaggaaaaaaacccccggggctgctccgagtgcttctgctttggcgtttctgatgtctgcagcagcctctcttggcctgttggtcaggtgggaggcgccatctgcgaggcgggatttaatgagcaggtcgtattgcacaagcttggcacgagctgtgtgaggaggaaatgaggatgacttcccctgtgacaccactctcatcgctatgcaatgatactgacgtgggtcaaaggcagccgtctgcctctcaaggttctttataggtcatgtgtttactcccacacacatttctatatagaaaaaacaggatgatgtggcactagagaacacgtcttgtttcaatttcttctgtggggaaatggattgggtggggaggtcggctctccctccgcccgcccctgctgctctcaggcctgggagcccagagggccgtggggccatggggattttccagctcaaagaggctaaggagtaggaggccctccagtggcaagggtgggaacagcggcacgtggtgtagggtttaggaatgcaggccaagttgtttccggaacagggagttctggggtgatgggttcaacaggggtgtccagtggtggctaggagaggtggagatggtgtgatggctgcaggcaagggaggagctgctcggtagggacttacccagcagtgactgctgtggccaccatgctgtggggagtaccatcacctctatgtcggtgacacattgggagtataagatctagaggttatctttgtacatttttcagcatttgggtaaaaagcagggggcaacgaagaagagggagtcagagttagcaagagacattttgctgaatgcgtttatgatgttctttgctgttttaaatctaaaatctatacccatggcctttatggttttgctcatttatttgcttacactggatctggatttggagtagtgagacttgttctcaggtcctcctggtcctttacaagtggaagggtcaagggtcatgaggttcagcagccacaggtgttatgttaatgccgtccctagagaagctttctggcccatttcttcattgtgaaaatattagtgctgcactgggtgaaatctaaggtaagttctatttcatacttcaaaattcttgaatttgtttttaaggtaaacagtatgtccgggtggctggtcaccgacttgatcagtcccaggaagatcccgtctcagcaagatgcactaggcgggcgccatcaggtcagcatcaacaacaccgcggtcatgcagagactggctcccaagtactactgggcagcccccgaggcctaccttggaaataaggtgcgtgtgaccctgcaggtagcgatgtctcagatgaagatctcagggaacactgagaaggaacttgcgctgcttgcattttaggtagtctcatagggcacctgagtgttggacagcatttcatagcctgtacttggatctgatgatacaaagaaggttttctagccttgttaaactttatgttgtattattcaaataagaacttctgctcttctggtctggttcctgagcagtgtgtttggtgaagtctcatccccctctctgagataaactttctgggtccctggatcacttgtttatgaagtgttcctcacattcccgctttgtttagtttgccataggctcagcttagagcctccatggcttagtggagggcctggcatacaagaaacaacccagggaaggttccagcaatgggactgctgtgctgctccctcactttgagtaccatggcaggctgtgctcatctgaagctcacatttaggaacagatggaatactttctgcttttgttatatttcaagaaaatgcaaactggtgattctgcaatgtggaggttggtttgtaagcttgggccttccttgcaatgatgtgttcccattccccatccccagttatgctgcatctctccagattctgattgatacgaaaatttattcccgagaatgcatctcaattattatagctccctgcttaccttcccgggttctttgttttgttttgttttaaagtaatggcatacaggcatgctagtgtagtcttgtagcttggtacgcttctatttaatttgatgatattttcattttaaaacttgttttgtatatttttaaggagtatttatttttgaaaattattttttcatcaaattataatcctagaacatgtgctgtatttatatgattttatcaacagagttcaatgattttttttctcttgatatcacttctccaattttatggtgcaaagttgggttctgaacaatatattgctgtcatatacccatcagaaagaaaatcttaattttatattgaaggacatctaatcagaagaaacacctttagtcctttctctaactagcaaatcagacatattctttgttgtcctatgaggaggatgctgaaatgaaaatgtggagattgcagacatgggtcaaactcctcatcccctaaattacttaaacgaagtaaatatctattgtgtgattaacaaaagtttatagtaatttgccttgtggtctctaacaaagagtacatttttcttctgtgctttcaaacagtgtcctacatgttggtgatattgatcaaccaaaatgtttatgaatatattcccctttcactgcctttaatgtgaatttccttgtctgtcatggtcaaggggatagttgtagcctagttgtttgcagatggatcccagtgaccacttcctcttacttgattgttgctgtgattgtcttcccctttcgtgttcattctcgcttaaacatttcagctgactgcgtttggcggattcctgaaatacacggtgtcctacgatattccggtagagacggtagacagtaacctcatgtcgcatgctgacgtcatcattaaggtgattgtttttgctttgattctgctatagagcttagggtttagtgggctgatagtttatgactgaaagtgactaggtgagggcatcccagcaaggagctggtggccaggtggccattcagcagaccctggacttgcgtggggactactgagatggtgagtgtgagaatctgtctttgagcccatttctggagttgcctcaggacagcacctgccactcttctcttcatctccagggtgtacccatcttttcacatttaaaaagaaagggagctgggcttggtggctcatgcttataatgtaagtgctttgggaggctgagacaggaggattgtttgaagccaggagtttgagaccagtctgggcaacatagtgagaccccgtctctcaaaaaatattagccaggcaccatggcatgtgcctgtaatcccaggtactcgggagggtgaggcaggaggatggcttgagcccaggagttcaaggttatagtgagctgtgattgcaccactgcactccaacctgggtgacagagagagagcctatctcaaaaaaaaaaaaaaaaaatttaagtcaaaaggagacaaattttttctctgaccttgaatcttcttttttaagtctcttcttccctgtgccactttgcctctcagatgaatggattaggcagtacttggcggtctgaggacagtagacgtgttgccatacttgtcctcagtctctgtccctatccccacatcctcagtctccataaaaagatccagctcagtcaggaggactccccaagtggtaatgtcccagggtctggggcatgtctgggcagaaaccactccaggttcttgtctctcatgtcctttcacctggagctatcttcacctccatctccagcctgaacaattgcagaccgcacacggtaaatcacttttgttaacagcaacttgatgaaaagctggagctatgtttacatactttttctacttctgtactttagttaaagattagaggtgtcagatgggttgctttgataaaagctgtgggcaactgcatgactttctctcttttccaagatcccagcgaagtacacaggctttcagtttattaccagaacccctctaaaaataatacaatgaaacaccttttctctgataattctgggtcaagagctgtacacaccattacacgtttgccacaagaagctaggcacgaatgaaaaaccacgttgctgaatacaaaattttattttatttttattttatcattaaattgaatgacaaatatattttctcttgtttttaaatgttagggaaacggactcactttaagcacacaggctgagggtctgtcattgcagccttatgaagagtacctaaacgtggttagacttgtgcctgaaaacttccaagattttcacagcaagaggcagattgatcgtgaccagctgatgactgtccttgccaatgtgacacatcttttgatcagagccaactacaattctgcaaaaatggctctttacaggtatgtattgaaaatggaggaaaaacttatggtgaaggtacttccattttatgtttgtttattcatatatatttaaagctcaacgtattttacattcattatattaaggacacagctacaggaactggctgtcttaagaattattaagtttataaatgtaattttattgaaaacgtaagaacagttatccacatcaagtgtatccagtagaagacagacttgacattaggatgagaaactttcaaagggggtttctgggaaatgcacgatgagttagcgattgtctggaccatgttgcacctggttctcaccatcctaatgttaatggtcttagcttttactcagtccatttaagtgaacgtatccatcgttggtcatttgattactttcgggaggacaatttctggcaatgccgtgccaagcataaaagttgtatgcagctaggctgggcatggtggctcacacctgtaatcccagcactttgggaggccgaggcaggtggattgcgtgaggtcaggagtttgagaccagcctggccaacatggtgaaaccccatctctactaaaaatacaaaaaattagccaggcatggtggcgcatgcctgtagtcccagctattcaggaggctgaggcatgagaatcatttgaacccaggaggtgcacgttgcagtgagctgaggttaaggcactgcactccagctggggcagcacaacgagactttgtctcaaaaaaaaaaagttgtatgcatctaacacaaacatagcatgacacatttaagggtaatctttctatttgtgataattgaatggattaatttttctgaggtgcttcaactccaaataggcaacaccagacctttcccacagtcatctgtgggcagcagcatgactttgtaccaaacattgaaggcatttccagggaataatgatggctcccagagaatatattgttgtgaaagacctttagttatttacaaaaatcacatcacccttttattggatttaagtcttttttttttttttttttgagacagagtctccctctatcgcccaggctggagtgcagtggtgtgatctcagctcactgcaagctctgcctcccaggatcaagcgattctcctgcctcagcctcctgagtagctgggactacaggcacatgccaccatgcccggctaattttgtatttttaatagtttcaccgtattagccaggatggtctcgatctcctgacctcgtgatccacccaccttggcctcccaaagtgctgggattacaggcgtgagccactgcgcccggctggatttaaatcttttaggagcccatcttcattgagatgtgagatgtatttgcgagcgtgtgagtcacataacaatctgtctgtttgtaggttggagtccgtctctctggacatagccagctctaatgccatcgacctggtggtggccgctgatgtggagcactgtgaatgtccgcaaggctacacagggacctcctgtgaggtgacgcttctctcttcctgtctttttccttttgttccttcctgaggggaaaacagtgcactgaaggggatgtcatggcaaacatttgatttttagctttagcagcccaatgtttggctcagtcttttttgggcaatagaaatattagaagtcacattgtttaaaaaaatcagattcctccaccaggaatgggctggagcaccggacaatattctgacttagtgctgccctcctgccttagtcaacaagaaacttgcaatacgcatgccattgactgtgtttctaaggaggatggaacttgatcatatctgaacatttacaaatcaccagcatgtgacctgggtagctttagacaagccagccctattttgagaccttttatggcccctcgctattttactttggtgggctccaccttacatgtgaaatatatgaaaatgcacttggaatcctcaatgaaagtaatctgttgctaaaaatattttgaaatcacttggacaaacatattgatattaataccataacaagaataggccgtaagactcattgcacaaccattacgtttttgtgtgtgtgtttctacctttaaaaagaaataaggaactggattatggtgatggttgcacagctcggtagggtttttactaaaagtcattgaattgtacacttaaaatgggtgaatggtgtagcatgtaaatgatacctcagttaagatgtttaagaaaaaagacatttctgtactctggcaactgagcagtttctgtttgtaacgtagtggaaagaggatgactttcccttctcttgcagtcgtgcctctctggctattaccgcgtggatggaatactctttggaggaatttgtcaaccctgtgaatgccacggccatgcagctgagtgcaatgttcacggcgtttgcattgtgagtctctcactgtagctcaggtgccctctcctcctcaattcagagccatttgctgtgtacaagtgattttttttaagtgcttcctccacggaataaccctagcctcatagaccccaaagaaaatttacagatttaagctcatgtcatgaaatgtttcccgttttttttttgaaaaaagttactttggtaatagtggaaaagggatatacaacttcattatagttctttttattagaataatataaagtaattgtttttatttgctgagactataaagcaatagaaaggtaaaaaatgttgtctacttattaaatacaaagcataggatctttagatgagagtgctaatatttatttatttatttatttatttgagacagggtcttaccttgtcacccaggctggagtgtggtggcaccaacactgcttactgcagccctggaccttctgggctcaaatggtcctcccacctcaaccctccaagtagctgaggccacagacaatgctagtatttttttttaatcatgatattacataatataccctaagaagaagaataaagtataatcacactcacttatataccatgctttatagttagttgggataaattaatcaaacaggtacttctttcatgcaatatgagttgaaacagggcttaagaaataggtagttaatcttgagaatgaactttggggcaggtatggggcaagacttgtttcttgacttcagtcaggaattcttctaggccctatgccctgaagccaggccacactctggggtctcatgggtttgatcctcagaggtggagtgactgcatatgctgatcagctgtaccctggtcgcctggcagggaaatgttcatgctttttccaaaagagattgactgagtcacagagttagggaaaattaattaccagacccagggagaagatcttagaatgatgtccaggatggcttagtgtctctagaattagaacttaatttttctttattctgtaagtaaaacttttgttttgccctttgttctgtaagtaaagcttctgtaggaattgcatgaaggggtgctttacaggcagactcagtccctccaggattgctttcctcaggtgcacagcttccaaccgcttgatgaggtggttgcttttttttcacctcctttcttttgccatttgggtttgcaaggcctcctgccagcatttggggtggggtggggtggggggtacagcaggctgtggttctgccacttatgtcttttgtagctaggctgaaagagtagatttctcatgcttccattaatatatgttcacaaatatatattcatattaaagtgataatgctaaatagcagctggccttaaagctttaatttgaataaataataattttatagctttaaacatgttttggaaataattttagacttacagaagagctatgaaagagttacagaagtacagagagttctgaagtaaccttccctcagcatcccctaatgctaccatcttgcataaccagagtggagttatcagaatgaagaagtagcacgatgagatgaactacactgcaccccacattctgatttcgtcagtttttcacccatgctccttttttttgtaggatcgaacccaggaccccacaccattcagtgactttgcctttttagtctcctctcctctaggaaagttcctcagacttccttgtccttcatgactctgacacttttgaagagcactgagcattctgtggaatgtcccccagccagggcttgtctgatgctttcctatgactaggttgaggttacacatttttgaccagaagacgtggaggtgccgtgccctctcattgagagcagatggataggatatcattgtgtcttcttcctggggatcttaatctgggtcacttgaattaggtgatgtcagctaggtttttccactctgaagttactatttctcccttcttaattaatgtttgagagggcaaaaataataaaaatgtaaattagaatttaaggaaatacaaaaaacatggtagcatcatatatctgttaaatctaaccttgctggttttttttttttctaatatattgtaaaaacaagcttgaattcttccttttgtgtagttgtgcatagccctgggccttgcgtataactatctagcttgcaggagttaattctttatttacagttcattagagatgaggttccagttgctcttagagcccctgtttttctctctgagctctcttagctctttattcaaaggagaagcctgtgtattttccttgcagcttggcatgatttagaaaaaagaatggcatcacagtaaattgtgcatgtcttgggccctcatgtctttcttttttcaatcgaaagatgtttttcctccccaaggagaggaatagtctcattccttcacacaccagattgaccaacagggacagtcaggtaaagggctggtggcacacgcctgaaaaagcactgaaacagaccctcagtgggtttttcaacaggactacatactagtttccccaaagagaaagaaagcactatctgactccttgatcaaagaaaacataccatagacatgttccaaatgagcattatcaaatatttttaaaatgaaattgcagttactctgcagaatacttttagctcaaccatgtaaccctttactaagaccagttgcatcttgaattaatttggattcattatcaaacccaaggtcctatgaaggatgggaaggaaaaaagggtctaagactctgttgtctgaggaccagcagtgtgggcatcacctgggagcttgctagaagtgcagaaactcaggccccacctcagatcccctgaaccagagtctacaggtaacccaggtgcaggtgcacttattaatagattcatattccagtttagatgctctggtctaggataaccctaagtaaaactggtgaaaccctggagtaaaatggatgtaatacaaatgcttacaattccaaattaaatgtggtatatgggaaaactttcatcaacctgaggaatgatggaaatgtatatggtttagaaactggaaatactaaattgctagatgaaaaatgaccaataaaagtatgtaaaatgagtggccgtaggagaaggggacacggggaaatgggagctgaggtgcacaccaagaggagcagccacacacgtgtgcagaacaagccccgctcccttcgagcccgtagctgcccgggggtcagtggtgcctggtcctggccccagtgccgacctccgcacccctcccctttgctcctgcacacctcctaaccaccgactgcactttcttttagaatgttttaaatgagggggggaaagtttttcatattttttcatgtatgtaccatttccagtgctcttcattcgctggtatagatctatgatttcatctagtaggtaccacctttctacagcctggattgttagcctttctgtagtgcagatctgctggttgacagattctcttaactctcctttatctgaaaaaggcttgccttcagttttgaaattgatttttacagatttctctttcagtactttaaaattgttctgttgccttgtggcttacatggcttcaggtgagaagttagttggtggtcatctgcttatttctgtgtgttattctgccttttttctctgcctgctgttaggagggtctctgtgtccctgggtttgaacactttgactgtaccttggtgtgtatttctttatgctgggggtttattgagcttctagaatttgtgagtttgtagctatcagcttatgaaaagttttgaccaaatagcttttcagcttcccactccaatctaattgcacgtgacattgatccacagatgatagaggctgggatcttttgttttttcctaaagtttgagtttctgttgttgtcttcaaattcactcgtcttttctcctacaatgttgaagccgatgcccacccattcagtacttcattttggatatggtagcttctagttctagaagttctacttggtcctactttatatcttgcatttctcttttcacagtgtttatgtttccttcaagtctttgagcatgcttataatagcttttttgtttttgttttgagatggagtctctctctgttgcccaggctggagtgcagtcacgtgatcttggctcactgcaacctctgcctcccaggttcatgcaattctcccacctcagcttcctaagtagctaggattacaggtgcacaccaccacgcctggctaatttttgtatttttagtagagatggggtttctccctgttggccaggctggtctcgaactcctgacctcaggtgatccacccaccttggcctcccaaagtgctaggattacaggcgtgaaccaccgcgcctggcctatgttttacaagcctgccaattccatcatctctgtgatttgtgggcatgtttctaatgactgggttttttttttttttcctgattgtggattgctttttgttgttgttgttgtttctcatgtctagttattttcattccccataaaaaaaacccacctctttatttggaaataattaggagtttacccaagatttgtaagaataagaatggtacgtagaacacctgccatttatctagactcccgtgttgttgccattttccccatttgccttattaatatcattatctgtctacctatctaattatagtatgtttttctaaactccttgagaatagtttgcatagacaatggccattttggtgtgtatattgcaagaataaggcttgtctcttgtataaccatagtacacttatcaacttaagtaaatgtaacgctggtactctactttttctaacctaccacctgtttctcagttttgtcagttgacccaattatgtcctgtatagcatccttccctccagcacaggcccccatctaggatcagatgttgaattttattgtcgtgtctccttaggcttttaacaggaaatgtttctactgcctttctttgtattttatgctattggcattttgaataatataatcttttttttttttttttttttttgagatggagtctcgctgtcacccaggcagtggcgccatctcagctgactgcaagctccatctcccaggttcacgccattctcctgcctcagcctcccgggtagctgggactacaggcgcccgccaccacgcccggctaattttttgtctttttagtagagacgggatttcaccgtgttagccagggttgtgttgatctcctgacctcgcaatccacctgccttggcctcccaaagtgctgggattacaggcatgagccaccgcgcctggccgaatatagtcatttttttttaaaaatagaatgtccttggttctgggcccttcttttgtttctcatagattattcaggccggaatactttgtcaaggatgagtctctcagagcactgccaatgggagtcccagtgtctgtctggccctcattggtgatattaattctgattacacaggcaaggtgttggtcaatttttccactatatatgaacgattctttccttttgcaactaaaaaacagttggaggcggacactgtgagaccacgtgcatatcccactcttcatcagaattccccttagagtagcagtcggaaggttctggccgaagcagcacttgctgtcatgtttgcaaaaacttgatcctccatctcctgcccttgtccatgctcatcagtcagagagaaagctctcaggtttccaatttatacaaattacacttgctgatattaatctgaaaacaggaggccttcctcatatagctcagaggttggtgactggttttagcattttgtcttttttttttccacttggacttcaagttgcttatagataaatctgaaaatcctttaagacaacctgagctgattcttctggtgcatgttcctaggcgtgtgcgcacaacaccaccggtgaccactgtgagcagtgcttgcccggcttctacggggagccttcccgagggacacctggggactgccagccctgcgcctgccctctcaccatagcctccaacaagtaagcctcagacctcatcaacggttcctgccagcatggccaggattcccacccagatgcgtactaatgacttcagagcaagactgtgtgtgtaatatgtgtgtgaattttgcccagtgacaattgatttggattaaagacagaggggtgggttattttcttgtaaaccaaagtttggcttatgaaagcaggcaagaagaggtgtgtgccagcaaggacctatacacgccgttttccctcttgattcctcttggtcatcagttgtttcacaagtatatgttgtctacttaccagtgggctaggaggtagagggatacagagaggaataaaacattgtccctcgacttagggagtttttgatctaatgaccaaaatatgtatgcatgaggctaaacaagagcagtctaaatccattcattgattcaacagatatttatggagtgcctactgtgtcctgagttttacagcaggtgttctgaatagcaaactgttctcacctggccgtgggccccaggggactcagtgtggtcgtgactgtagtgagacctgtccaccagatggtggggaggagggagagcagtgtccagcctacctaggtgggtgcaggaagctcttctctcagatttgcaggagaaggaattccacaggcagcatagacgggcattctaggcagatggagctgggcgtgccatggcatggcagcaggaacaggcatcacccatttgaggaattgcagcaggccatggaacagaaggcatggagggagatggaaagagatgtaccaggcaagaccttatagtcacgctggggcaagtgcgtgccacaggccagcagcttaaaagcctctgtctctcgctggtttaacctttagaactcttccttcacccactctcaaagaattcccagtatataaaaaggatgcagtcagggttactcatgatgaaattgggggtgggtactgtcatccaccctgcacaggctcctcaaggtttaggaatagggttggaaggggcatccgttagcagggggtccctggagaggtgcgagagcctcctgaccactttgtgtttgagtgagctcacttttgccctggtatgggcagggctctgaggtgggaagtcagtgccagggaacctgagctggggaacccagcatcctaggagcacccgagcaggcctcctggaggaagcgtcagctgagttgggcactggggctgagctgggttaacccaggcagacagcgggagaagcaggcgcgctgtgggctgagaacgagaggagtagggagcagggagtgaggagtgagtgtcagtgcctggatcatgggaccaggagtccgtgaggggttgaggctcacaggtgggctgtgtgaccagaggccccggattctgagctaaggaggtctcattgaaggtctggaagcgcaggagtagtagaaatgaagcattttaaatagttagaaattcggcttcatccattggaaaattttgttcatttctaatgttttgacagtttcagccccacctgccacctcaatgatggagatgaagtggtctgtgaccggtgtgccccgggctactcaggagcttggtgtgagaggtactctgcatccactggcttcaacacattttcaaaattaaatataaattctatgtgtttatttttaaatgcgtagttaagtgtggttttggagttttgatgcataattgttatttcatagaatcattgagaaaaatcagtatttcatgttttaaaattaatgttaaaccttactgggaatttttaaagaacggtactcttttcctggctaatctgagttctcatcaagaacaataggctgggtgtggtggcccacacatgtaatgccaggactttgggaggctgaggcaggtggatcacctgaggttgggagtttgagaccaggctgaccaacatggtaaaaccctgtctctacaaaaagaaaaaaaaaaaccaaaaggccgggcatgacggcgggtgcctgtaatcctagctacttgggaggctgaggcaggagaatcacttgaacctgggaggtggaggttgcagcgagtggagattgcgccattgcactccagcctaggagacagagtgagactctatctcaaaaaacaaaacaaaacaaaaacaataggaagcagcaaggagtcggtatctgtggttcacacatttgaatattccattgctccaggctgttctggagatgacaggtggtttgctttagtagctgtcttctggctcctgaaggccagtgctgtctttcctatgtgtgcgtctcagtgcccagctctggctgagcctgcaggaggctgtgtggcatccggagtggtcaggggtgggtcagagttggccctggaaacaggtgcacgtcccctggatttatgcctcattttggacgctctcccccttcattgcgacaggtgaaggagatctgggaatgcccgagtggggagtcatatccctttcacagtaaatcttagggaacagagtccgtctgatttattagccattcagggagtccctggatagtgcggtaaggccttaagtaactgcatttgtctgatcccgctttcaatctttgatacagatgcgcagatggttactatggaaacccaacagtgcctggcgaatcttgtgttccctgtgactgcagcggcaacgtggacccctcggaggctggtcactgtgactcagtcaccggggagtgcctgaagtgcctggggaacacagatggcgcccactgtgaaaggtgtgctgacgggttctatggggacgctgtgacagccaagaactgccgcggtgagtgcgtgagcgtgaagtcaggtcagctgtttattgccataggaagtcttcaaccgtatagtcacatgtgtcacacagggcccagcctaggaggtcacactctcttgaggggttacttgcattaatgctgggtctctgatcaaatacagacccacgacccagttcttccctagctaccctatcctgagcttggttagtcataacccataggggtcagtggcctggaaagatgcagcctgccactcgagcagccagtgtgacttgacagagttccggctctgctccccgtgactgaaatgaaagtggggaagctcagagcctgtcacatttgtaagggagatgcttcaggggctgcacgaggcagatgggattccaagatgaagggtgggaaatggtaagactgtaaccccagaaactgcgtaaagcaccgtgtggtgcatcttagccctctgtgccaaaactgcccgacccctatggcactctgctgaatttgagccttgaaattacggatcatggagaaaactagattctcctacacagcagatgacctggccggagggatgattcagccctcagattttgaaggagtgaaagaacaaaagtggcaattataaattattttgagtatttcatataaatgccagtcacactatggtactacaacgtggggacacaagagggcaccagctgtacagaaaacatactttcccaggcacacatggagagattggaaatgttttatggccctgggccaatcaagctgatctccagcaggtggccaccttgactggctatcataccaggataattatgataatagcatttctacaaggcttcacgatttgtagaatgtttttatcattttcatgtcatttctcttcatcattactgcaagccttggtgattcattcctccgttcattcattgtttattaagtgtccggtatatcccagacgctatactaagaactgtgacaggtagttgggaaattgtgattcaagtctactgggaagctacacatgatgatggtatggggggaaaacatacctgtggatccaggtgttggagtctcgactaatgtgagttttgttccaggaccaactgtgtgacattgggctaatttattagcctctctgagccactattttgttattcataaaatagacataattatatgtgtatatcaaggcctttctgagaagtcagtgcgataacatttaatgttctagacatgaaataaatggtagctattataattactagtaataaaccaattattattatattttataatatattatatattatattaatataatatattattatattttcacaccactgctgtccaatagaaatacaatgtaaaccacacatgtaatttaaaattttttagtagtcacatttttcaatagtaacaagaagtaggtgaaatgtattttaataatacattttatctgagctgatatattaaaaattagcattttgtcctgtgatcaggttttaaaagtattaagcaatatttactttcttttttagtactgagtcatcaaaattgaatgtatattttatagcccagctcaattaggatgctaaattttcctcagaagtacttgatctgcatgtaggttacagaaaatttacaattgaaaaggtagttcaaacatatttaaaattttccatcctgtaccaaaaattattttctttaatattggcatccacgttgacaaaaccgcttcagtatttaaatttaaactcagagatttggttcttcggttgcatcagccacatcgccagcatttggtagacgtgtggttggcagccacaggacaagactgtgaaggtcaaggcgatgaatgactgtcgggggttgcacttgaaggcacggaggcgggcaggcccatcagcccagggtggcccgggctgcctcctgaagggggtgctgttcatctgagacttgaaggatgggaagaagagccgcaagaagagtgaccagtgtgggaagatgggcccaggcaagtgggcaggccctgcctgaggtagacactggagacagagtgaccagaatggaaaagacagagacaggaaggggaggtctcgggctgacaggtgggaagcagccacgtcggaagggtctcctgtgcagtgttgaggtgctgaggtcacctcgtcctccctgtcctgggactcaccagcaacttgtgcagacatggagcgggtcagggtgtgattggagctgtgtgtttgaatatcgccctgctgccagcgtcgaggagggaatggctgccaggggtgttgggttaggagacaagaccggaaatgaatctttctggtaagcattgatgagggcttcaggtagggcctttgccatggagataaaagagaagacgtaaaataggtcttgatgacagggtggaaggtggaggaaggacggttagagcagctggggtttgggtctgggcctgggctagtagggctgatgctgaccaggctgtctctggtttctgaacacttacagcttttatcctttctcatcccttctctcgcatcccctcgcttcgatgagacaaagtcctgtgaactgtttctgcatatcccacgagcagtccttccatttctataacagggttccctctgtggacttcctgtaggccccccattcttatattctgttaggttaaaccaagtgcaagtgccggtgttgtgtgtgattgaccttctctaaagcaagcgcgtatagttcaacccagtatttatctgtttccccccaccccccgtaactctcactcacttgaagcttggtaggaggagaaactgatcgtcaggttcacctcctgcctctgctgtggggcagcggctgcagccggaggtgtggacaggccgtccaggtagagtagagcgctgagggagatgagggtggtgagaaacctcacagaactctaatattaaaggactcttatattaaataagttaaatgaggataatttttatattgtgagctactcctgagaattaaaatatatataaagtacctggctattcagtaattggcctaaaataatactattttaaattagtactatttataacataaatactattttaattaagaattactataataggccgggcatggtggttcacacctgtaatctcagcactttgggaggctgaggcaggtggatcacctaaggtcaggagttcgagaccagcctgcccaacatggcaaaaccccatctctactaaaaatacaaaaattagctgggcgtggtggtgagtgcctgtattcctagctacttgggaggctgaggtgggaggatcacttgagcctgggaggcggaggtggcagtgaactgagatcgtgccacggcactccagcctgggtgacggagtgagaccctgtctcaaaaaaaaaaaaaaaaaagaattaccataataattattactgcagagagagaactagtaatagcagtgtgacctatggaaagttatctaatctttccaagttgtagatttcacaccggaaatagagaacattatttcgcctccctccttggtttgtggtgaaagtacaaagaaatactgaatgtgacaggcacagactaacagacacatcatacagtgaatatgattttttaaattatcatcaatagtttgcattgatcatacttgcattgaactttaaatattccccagagaaagaggcggcttgaaatgaaacacggaggggagacacacgagaaacaagagggagggcaggagagtgggcgtcccaaataccacaggaagagggcgatgcaaaagggagagggaggtcacggggtcccttccgcagagccacggggtaagagggggaccgaagactgctccctgaatttggtgcctgggaaatctctggagactttagggagaacagttgtagcagacaaggggccaggaggacaccatgagaaacttggattggacgaacgtgccagggaggtggatgttctgatggagggtaaaagggagggggtgtcttgtgtttgatgggggcagtggagaaggacgtgctggggagttagcagcagagtccgcacggtccagctacggcgttgatggagcaagtccctgaagggcgccggtgaatggggcctctcgtgggactgcagcattaaggcccccactccaggaaaacagacggccagcctggcctagatcatgaaggaggcggatcccagcacgtttcctctgcccctgaccttcccatgtcatgtcccatgtccagcactcttgctgcagcctccaggtcgtgtttaggccttccattatttgtgaagtttttctctcttttttcttacattgttatgtcatgacacacactgtacatgttctgagtccacacatttataaagagtgcctgggggcccggcgcagtggctcacgcctgtaatcccagcactttggaaggccgaggcgggcagatcacaaggtcaggagattgagaccaccctggctaacacggtgaaaccctgtctctactaaaaatacaaaaaattagccaggcatggtggcaggcgcctgtagtcccagctactcgggaggccgaggcaggagaatggcgtgaacccgaaaggcggagcttgcagtgagctgagatcacgccactgcactccagcctgggtgacagagtgacactccatctcaaaaaaaaaaaaaagagtacctggaatattttaacaggcaacatattaaatgttcttttttttttttttttgagaaaggggttcacacttgtcgctcaggctagaatgcagtggtgggaatcnnnnnnnnnnnnnnnnnnnnnnnnnnnnnnnnnnnnnnnnnnnnnnnnnnnnnnnnnnnnnnnnnnnnnnnnnnnnnnnnnnnnnnnnnnnnnnnnnnnnnnnnnnnnnnnnnnnnnnnnnnnnnnnnnnnnnnnnnnnnnnnnnnnnnnnnnnnnnnnnnnnnnnnnnnnnnnnnnnnnnnnnnnnnnnnnnnnnnnnnnnnnnnnnnnnnnnnnnnnnnnnnnnnnnnnnnnnnnnnnnnnnnnnnnnnnnnnnnnnnnnnnnnnnnnnnnnnnnnnnnnnnnnnnnnnnnnnnnnnnnnnnnnnnnnnnnnnnnnnnnnnnnnnnnnnnnnnnnnnnnnnnnnnnnnnnnnnnnnnnnnnnnnnnnnnnnnnnnnnnnnnnnnnnnnnnnnnnnnnnnnnnnnnnnnnnnnnnnnnnnnnnnnnnnnnnnnnnnnnnnnnnnnnnnnnnnnnnnnnnnnnnnnnnnnnnnnnnnnnnnnnnnnnnnnnnnnnnnnnnnnnnnnnnnnnnnnnnnnnnnnnnnnnnnnnnnnnnnnnnnnnnnnnnnnnnnnnnnnnnnnnnnnnnnnnnnnnnnnnnnnnnggctcactgcaacttccgcctcccaggttcacgagattttcctgcctcagcctcccaagtagctgggattacaggcacgtgccaccacgcctggttaatttttgtatttttagtagagatggggtttcaccacgttggccaggctggtcttgaacgcctgacctcaggtgatccgccttccttgtcctcccaaagtgctgggattacaggcatgagccactgcgcacagccaacatgttaaatattctaactgaagtgcttattaagggttcccctgtgaatattgattaaatatattttggacccgtaagattgtatcactttgcaaaggtagggaactttgtagctttaagcatcaatgttgtaactgtagataaaatggaaccatctgacctgaaactacaaatgactcatgacttagaactgggatatcatatttaatgaaaagatatttttcattaaattatgaaatataatattaatatgtacttatttagattacgttttaactgagctttaaaatattaaatatgtacctgtttggaatcagaggaaatggctaagttgattttgaaatctccattgcatgtttttcatgggaatttgtagctcatttaaaatatgtccaggaagtcatgaaattggttaagcgaatttgctaattattgtcttaatagcttcaatgtgtttttcctgtgatggatccttccactaaccctgttttagtttactcttcagaaaaatgctaaacttctaaagttattgccaataatattatttttagttttgtgatttgaaacattgaaagtttacattttttttttcctttggggatgacggatcttatgataaccatcctcagaagtgagggttaatatgtctttgtgtgcatgtgtttagcctgtgaatgccatgtgaaaggctcccattctgccgtgtgccatcttgagaccgggctctgtgactgcaaaccaaacgtgactggacagcagtgtgaccagtgcttggtaagatgcatgtgactaattgacaacttagccttggtacagaggcgattgaatccatgactcagaaggagctaagtccccaagtgtattagtctgttctcacactgctatagagatactacccaagactggggaatttatccacaaaggaggtttaattgactcacagtttcgcatggttggagaggcctcaggaaacttacaatcatggtggaaggggaagcaggcaccttctttacaaggcagcaggagagagtaactgtcaacacttataaaatcatcagatctcatgagaattcactatcactagaacagcatggggagctgcccctatgatcaaatcacctctctcctttgacacatggggattacaattcgatttgcgatttgggtggggacacagagtcaagccatgtcacaaagtgtggctgacaagtgccgtgcctgtctagagagtggatgtttgctgtaaagggatggggatggtgtcatgaatactttatgattctatgaaataccctgtgtgtgttctggaacatactaatatgaggagtcatttattaaaacgtatgttggtttccactttctccccatttggtgaaacagcatggctattatgggctggactcaggccatggctgccggccctgcaactgcagcgtggcaggctccatgtcagatggctgcacggatgaaggccagtgtcactgtgtcccaggtgtggcagggaaaaggtgtgacaggtgtgcccatggcttctacgcctaccaggatggtagctgtacacgtaagccttgatttccttgtttgagactttgtagtcattcccagagctttccttgggccctccctctacttccaactaattttggttaagtgcctgtactttttctcttctttccctggaggatttcataccttttttctggtttctggtccctatcagggtacaagcctaagttttggtcacggctctgccgcctactaattgtgggagcttagattcattacttaactttgcttggcctcagtttcctcatctgtaaaatggggatgctaatgagaatctgcattgagaagttagtgtaagtgttctatataaagtcctcagcatggcattgggcctgcagtaagtgcttagtaaatattggctccctctgtgatcacctagtgagggctttttcactcttctctatttcccctgtcctgtccccatttccccgcttccctcagcatctcctgagatggagggccggctacctccatgagacatggaggggtcttgggaattgtgaggtgtcttttaggagtgagaagagtggcttggactcttaataaaagggaaataacagcatcagctcttagccctttaatgacatcacccaaatctgtaacccagcattcatctttatttcagcctgtgactgcccacacactcagaatacctgcgacccagaaactggagagtgtgtctgcccccctcacacacagggtgtgaagtgtgaagaatgtgaggatgggcactggggctacgatgcggaggtggggtgccaggtgagcgctgtcatccacgctcttgcttaactgagagttgctttgctgtagcaagtttcaggcctgttcttctatatattttctggactttaatctgttgaatagttttgtgagtttaaaaaaaaaaaaaaagctcaatgtgggccaggcacagtggctcacacctgtaatcactgcactttgggagactgaggcaggaggatcgtttgaagccaggaattcaagaccagcctgggcaacaaagcaagaccctgtctttgcaaaaaataacgattaaaaaaaaatttagcctggtgtggtggcacacgcctgtggtcccagctacttgggagactgaggcaggaggatcacttgagcctagggattcaagtctgtagtgagctgtgatggcaacactgcacttcagcctgaacaacagagaaagactctatcttaaaaatcaaaaacaaaaacaatacaccttagtgcagatgataggaatcaaagtgaaagacacgacacccttaagacaccttattctaggttttcttcaagaacctagttgttacattgatggttagaaaaatccaaaaaatggctgggcgcggtggctcacacctgtcatcccagcactttgggagaccgaggtgggcagatcacaaggtcaggagattgagaccatcctggctaacacggtgaaaccccgtctctactaaaaatacaaaaaaaattagctgggcgtggtgatgggcgcctgtagtcccagctactcaggaggctgaggcaggagaatggcgtgaacccgggaggcagagcttgcagtgagccgagatcgggccactgcactccagcctgggcaacagagcgagactctgtctctctgtctcaaaaaaaaaaaaaaaaagaaaaagaaaatccaaaaaatatttgagtgtcctttaatatattgtgcaatgtatactatcttccaagagaaagtaataaatcactttattgggggtttatgtccaaaccatgaggcctccagttttctatgtagccttcttcagttaaatttgggtatagtttgtgttttggaaacaagaggaaattacttttttttttttaaattgagacaggatcttactctgtcacccaggctggagtgcagtgacaccatcaaagctcactgtatccttgacctcttgggctcaagcaatcctcccgcttcagccccgcaagtggctgggactacaggcatgtgctatcacgcccagctaattttttgattatttgtagagacgggggtctcactatgttgtccaggctggtctcaaactcctgggctcaagtgatcttcccacctctgtatcccaaagtgccataattgcaggcatgaaccactgtgcctggcctgatttctacagtaatttcgttagacttgttttgacctagtaaatttaatttcagttcacaattttggccccatgcgcatgtgccactaagatgcacagatttccggcaacacagtgcctgtctcctgttggcacatggcaacgtgaatccatgcagcaatagcaagagagagatggttcatttgtagaacttccccatatgtagtgttttcctgtaattcaaatatgtgcgcacttggaagcatcaaatctgcctttttattgagttggttttcccatctctcaggcctgcaattgcagtctcgtggggtcgactcatcatcggtgcgatgtggtcaccggccattgccagtgcaagtcaaaatttggtggctgggcctgcgatcagtgttccttgggttacagagactttcccgactgtgttccctgtgactgtgacctgagggggacgtcgggggatgcctgcaacctggagcagggtctctgcagctgtgtggaggaaaccggggcctgcccttgcaaggtatttaccatccatcctcctatttcatcctgtctctggctcctcatcatgactcctgggctttgactacttacctaagcagccaggttttggatgcttttcctagtgagttcacactcccttccacatctgagttcaaagtctcttatgctcctctagagtgatggatgatttttgaaattgaatttttactgttacaagtgtcagttgatggaaccgatttgaaaactgccctgaagttttaatcatatatcccagaggctgagtggctgtgtatcttgagtatgcaggtgaggtaggtttctcagggctttgggatttgtgatgtgatccctgtgaggttattgggctcccgtatgtgctggccacattgaaggaaatcggggtttattattttcccaagaggtaagacttcaatgtcattataagttttgtgtgtttccgttagttttcccaatgtgctttgctgttaggaggtcagagccacctcctctggtccttttcccatgggtggtgagatgggagccctctggcttgatgatggtaattagctgatgggtgactggagatatgaaggaaaactcatgtagatatcatggcctgggaataatggaagcatcagtctccccgttttcggccttatttatttatttagagacagagtctcactctctctctcaggctggagtgcagtggcacaatctcggctcactgcaacctctgcctcccgggttcaagcaattctcctgcctcagcctcccgagtagctgggactagaggtgcccaccaccacgcctggctaaatttttgtatttttagtagagacggggtttcgccatattggccaggctggtctcgaactcctgacctcaggtgatccatctgcctcaacctcccaaagtgctgggattacaggtgtgaaccaccgcgcccagactctgccacatcttataaggatatctgctatgattaactacaaaagaaacacgacgtcttttaagaatctctatgaaaaaataccgttatcacctccttcattgctacttcttggtacggtctaggtccattcattgggggtggtgcgtccttgtagatgacttggtttctgatgccaacaccttttatgaaaacttgatgctcaaaattggggggggcgatgccatccaaaaaataaaaagccaccctgtacttcagtttgccaccataagccatgagcgtatcaaataataaagtggtgtttacttctttgacaaagctttcccttcaaaacaatttattggaagaatgcccccatatgataaaaaacttgtttcttaaaannnnnnnnnnnnnnnnnnnnnnnnnnnnnnnnnnnnnnnnnnnnnnnnnnnnnnnnnnnnnnnnnnnnnnnnnnnnnnnnnnnnnnnnnnnnnnnnnnnnnnnnnnnnnnnnnnnnnnnnnnnnnnnnnnnnnnnnnnnnnnnnnnnnnnnnnnnnnnnnnnnnnnnnnnnnnnnnnnnnnnnnnnnnnnnnnnnnnnnnnnnnnnnnnnnnnnnnnnnnnnnnnnnnnnnnnnnnnnnnnnnnnnnnnnnnnnnnnnnnngattcatcccgcactttggaaggccaaggtgggtgaatcacttgaggtcaggagttcgagaccagcctggccagcatggcgaaaccccatctctactaaaaatacaaaattagctgggcatggtggcgggcgcctgtagtcccatctactcgggaggctgaggcaggagaatcgcttgaacccgggaggtggtggaggttgcagtgagccaagattgcgccattgcactccagcctgggtgacagagcgagactctgccttaaataataataataataataataataacaataataatatttatcacctggccggtggcgcgcacacccagggattatcagaatcacctggagactcgaggcggcttccagagttgtctcaggacattctcatcagggactctgtattttccaaacgattccaagatgattctgataatcatctgtgtttgagaatcactgattggatctttgagaaaactgacactcagaaagctcagggcctggctagaggaaactaatgtttgtgcatctataattatgtttaaaattatgtttgtgttctattttgtctctgtttgttcagaaatcacatctcttttctaggcaaaaatgagtcctttatttgctcccctttaggagaatgtctttggccctcagtgcaacgaatgtcgagagggcacctttgctctccgtgcagacaaccccctgggctgcagcccctgcttctgctctgggctgtcccacctctgctcagagctggagggctacgtgaggaccccagtaagtcacacacagccaaaacattctgcttctaaccccactcccctgggaagtgggtgggggtgggaaacacagccaagtgttcacattaaattttgctcttatggcatccaaaattctaggaagctaatttgggttagaatatgaatcagagctcagcttctgctggccgaggaagtaaatggaacttgaactaaaggctgtccatgttgttccttagctaatctatgaaaagctttcattggggagaaaatagaactgcaaaatctcagccgtcttctgcatatcattgaacgtttccccagtgtagcaacagtttggccctaaatggcagtagtttaaagcactttcagttcattttcttccagatgtttagtttaaaggaaaagtctttactgtttctgttttaataatgaagctgtttcatctgtgaaacaatgatggaatctaaagaatgaaactggagtggaaagttcgcattttgaagtgcactttcccctccttttgtggtttaggtaacgctgggctccgatcagcctcttctgcatgtggtttctcagagtaacttgaggggcacgaccgagggggtttactaccaggcccccgacttcctgctggatgccgccaccgtccggcagcacatccgtgcagagccgttttactggcggctgccgcagcagttccaaggagaccaggtgaggtgcacacccagccgagagccagtccgtgcttcctaggatatacagaaattgtttaaaatcaccatagtctgggccggcctgtcatttaaagaagtagttattaatttcctcttttaagtgggatcagagaagtttaatgctcataaaagtctcctcaaatatatggttccttaaaatttttcattaattttaaaagttttttaagttcacgttatattaatttggttcttcctaaagcagtcattcaacaaacatatacagtcatgtgtcacttaacaatggagagacattctaggggaatgtgtcattaggtgtgaacgttattattataatctcatgagaccatggtcatatatgtggtttgtcattgactgaaatatcattacgtggtatgggacccactgtgtttactgatatgctcttggtacaaacctaggtgctatggcctgggagtcccctttcaagaaattatcactcatttaggggggaaaaactactataaaagatcatgaaaggcatcacttggatttttgtttatataaacattggagtctgtgtgtgaattcaccctgatctttacaatttgcaaatatgcacccagtgctcctggagatagagaaatttttaatctaaaggggcttgaaaataatttgcatcactaccacattgatttgttattttggagctcacttttgtttgttttctcgaaaggaactatataacttaggtcaacttaataatccataattaaatggaattagaaggaagcaaattccagacaataaatttcacccatgtgatgtatttttaagatacaagatttctctcatatggtggcagtcttgcaataaaatgtttttaagtgaaagctttgtcagagaagtaaacaacactttattatttgatagctcatggcctatggtggcaaactgaagtacagcgtggccttctattctttggatggcatcggcacctccaattttgagcctcaagttctcatcaaaggtggtcggatcagaaagcaagtcatttacatggatgcaccagccccagagaatggagtgagacaggaacaagaagtagcaatgagagaggtgataatgggatcttttcatagaagttccttaaagacattgactttgctatggatgtagtgaaagatgaaagccattaataagagaatgagcagccaggtacggtggctcacacctgtaatcccaccactttgggaagccgaggtgggtggatcacctgaggtcaggagtttgagaccagcctgtccaacatgatgaaaccccgtctctactaaaaatacaaaaattagtcagacatggtggcgcacacctgtagtcccagctacttgggaggctgaggcaggagaatctcttgaacccaggaggcggaggttgcagtgagctgagattgtgccactgtactccagcttgtgcgacagagagactgagcaagaagaccctgggatcaaaattccagtgagattagcaagatctccaaaaacagtttgaatttcaaattctcaagaaatgtatattagttttatgtcaatttagtgggcactgcatcttaaattctttatcttggcgtactattttcaacctgcatagagatagtggtacaggagactttggacttgctcagatttgggaagtgtttattcttccagcagatgtttactggatgttcgctgtgtggctggcactgccttaggtaatgcatatctattgataatgggactgacactgcgcctgcccatggaggtttcaggaggtctttatcagttacactcagcggcatgcacagaacatggctcatttctggagaaatttataaaagaatttattctttataagttttatgcctgtcagaatttggcctctgagcttaattgaatgtgtctctcattctacagaatttttggaaatattttaactctgtttctgaaaaacctgtcacgcgagaggattttatgtctgtcctcagcgatattgagtacatcctcatcaaggcatcatatggtcaaggattacagcagagcaggtacttggagcttctagaattttgaccgttattttcatatttgaaagcaaactgaaagaatttgactcacttcacttccattacctactatttttattaatccatgtggttcagttccttcccaaaacatttttaaatattaatatcattatggaatgtgtgaattataacttaaagtatccacctagcatgctaatgtcgatataaaatataaggacataatggtggaatcttagctgaagataaaatgcaaaaaaaaaattgctatttctgcacatgaaaactgaaatgcccatgtcttcgtaatgatgtgtaaagaatgctgtcacctactcatctaatactttagcccataaagaaagccattaggtcttggccaaatcagcacttcaagaggtcttttaggtgtacttgtgtcacattatttttaaattctaaagtgtctaaagtgtgtcatgacagttagtaatgtgctttaacacacttcacttataatcacaagcaggaactactccaaacagggaagaaagctctggtttcatatatatgcaagtgttaggtcatgtgctatgtttctagaaagtttttcaaatgttagcgtttcctctcttaacatgatggctgcacagaatctcagacatttcaatggaggttggcagaaaggctgaaaagctgcacccagaagaagaggttgcatctcttttagagaattgtgtctgtcctcctggcactgtgggattctcatgtcaggtacggagactctagtcgaaatctatttcctgggtttgagttgaaatgtgcttgttacagcaactccaagagatgaacagaacttatgtgtatctactatatcatttttttctctttttgaattaaaaagaaattaattttggtaaaatgtacataacaaaatcttccatcttaaccattcttcagggtacagtttagttgtgttaagtacagtcacattgttgtacaactgtcaccactatcatcctcagaactttttatcatcccaaacgcaaactctgcactcattaaacactagctccccatttcctctctccccagtcccccacaaccaccattctccttttggtctctatgtatttgaccactctatggccctcctatatgatgtatataatacatggcacatgcctgtaatcccagctactcaggaggctgaggcaggagaatcatttgaacctgggaggtgaaggctgcagtgagccgagatcatgccattgcactccagcctgagtgacagagagatactccgtctcaaaaataaataaataaataaataaataaataagtggagtaatacagaacttgtctttttgcgaatggcttgtttcacttagcataatgtcctcaaggctcatccatgttgtagcatgtgtcagaatttccctcctttttaaggctgaataatattccattgtacatacatgccacatttnnnnnnnnnnnnnnnnnnnnnnnnnnnnnnnnnnnnnnnnnnnnnnnnnnnnnnnnnnnnnnnnnnnnnnnnnnnnnnnnnnnnnnnnnnnnnnnnnnnnnnnnnnnnnnnnnnnnnnnnnnnnnnnnnnnnnnnnnnnnnnnnnnnnnnnnnnnnnnnnnnnnnnnnnnnnnnnnnnnnnnnnnnnnnnnnnnnnnnnnnnggaaacgggggacccccccgagagctcaaaaaaagagaacgcttgggttccgattcggccccgtgcgggaatcccttaggaaacacctacaccattgttgtattgcgaaactggctccctgggttggaagcgtgaccagggtcattcttggatcgctccgtcttggatgtccaaagagcgcgatattgtattgttttcttttgaggaggaaaggatagtatgttttattgcatttcatctctcacacatacaggtcagttctcccattaccgtaattttgtttttttttttgatactttacgctacagtgcggggcatcacctgtgtttgtcattgcattcttgatagaggtgaactctttctatacctggcacattgttgtctccttgggaaacgaactctttctagagataaacttgcttctctcatagcattctcttctcctcagacttgcccctgggtaccacagagggaagctcccagcagggagtgacaggggaccacgccctctggttgctccttgtgtgccctgcagttgcaacaaccacagtgacacctgtgaccccaacaccgggaagtgtctggtatgctggtttgtgggggtgcttgcctgagtttagaagtaaagtggatgctgagtgtcagatttctggtctaagtcatagccgtgccttggtttagtgaggggttaaatttagctaaatataaaatataaacctatttccttgaggacggcatagcttagtggttctgcccttatcagtggaaattcttttataaattttcctttcttgatgaatttatctgtgggcatcaatttgggaattatagtcatgcaccaaataatgacgttttcttcaacaacagatcacatataggacagtggtctgataagactataatactgtgtttttactgtaccttttctatgttagatatagttagatgcacaaatatttcctattgtgttgcaattgcctacagtattcagtatggtaacatgctggacaggtttgtggcccaggagcaataggctctaccatatggcctaggcgtgtagtaggctgtgccatctaggtttgtataagtgcactatatgacgttcacactgtgacaaaatcagctagggatgcatttctcaggcagtatccccatctttaagtgatgcatgactgtagttgcatgccttgtttttaattgcagtactggttgctgtagtgaaaatagatgagaactgtatacgatgaagtttgggggctcacgtgggaattttaaaataagttaatgccagtgtcgaaaatgtatttctctgtgtaaagtattgccctctccttgcatttttttaaaaaatgcatattctctaggggatgataacagcacattattcacatgttagtgtgtgtttgcttctcagccaccttctcttaggccaagattggtctcggggacacatggagagctctgaccactgtaaacgactaagcggcccagacagaagcctcgcagccctgaccgaggacaaattcctgtgtccatgatttagcttaagccaatgaggcagataacaaaataatgtgatattcgtttcctactcctgaaagctcatgctttacagtcactcaggtggaaacattgattactaattgttccaagattaactcgccttgggtaaaataatgcattgaagggaaatgagctgcccaccaaggacacacccgaagccttggagatcctgggtgtggcccaatcacaaggaaacactggagccaaaacagaggaattaggactgcaggctcccaacctgcctcccgccacattttgattctggttttccctctttttgacaattcctgtcactgaaacccattataaacaaaaaatcgtgtctgggcttggaggatgggatttcagggttgcagtggtccctctattcttgtcagagtcccttcagattttattattattattattattttcaagatggaggcttgctgtgtcacccaggctggagtacaatggtgcagtcagctcactgcaacatctgcctcttggcttcaagcaattctcctgctcagcctcctgagtagctgagattacaggcgcctgccaccatacccagctaatttttgtatttttagtagagacagggtttcaccatgttggccaggctggtttcgaactcctgacctccaatgatccacctgccttggcctccaaggtgctgggattacaggcatgagccatcacgcccggctgtcccttcgatattaagtctgaactatagcagccgtgcccggcagtaatttagtgtacattttacacacctgcaacaatggggcgcnnnnnnnnnntgtgtctgtcctcctggcactgtgggattctcatgtcaggtacggagactctagtcgaaatctatttcctgggtttgagttgaaatgtgcttgttacagcaactccaagagatgaacagaacttatgtgtatctactatatcatttttttctctttttgaattaaaaagaaattaattttggtaaaatgtacataacaaaatcttccatcttaaccattcttcagggtacagtttagttgtgttaagtacagtcacattgttgtacaactgtcaccactatcatcctcagaactttttatcatcccaaacgcaaactctgcactcattaaacactagctccccatttcctctctccccagtcccccacaaccaccattctccttttggtctctatgtatttgaccactctatggccctcctatatgatgtatataatacatggcacatgcctgtaatcccagctactcaggagactgaggcaggagaatcacttgaacctgggaggtgaaggctgcagtgagccgagatcatgccattgcactccagcctgagtgacagagagatactccgtctcaaaaataaataaataaataaataaataagtggagtaatacagaacttgtctttttgcgaatggcttgtttcacttagcataatgtcctcaaggctcatccatgttgtagcatgtgtcagaatttccctcctttttaaggctgaataatattccattgtacatacatgccacattttgcttattcgttaatctgtcagtgaataaacttgggtggcttccccatcttggctattgtgaataatgctgctatgaacataggggttcaaatatctctttgagattctgcttccagttcttttggatatgtacccaaaagtggacttgcagaatcatatggtacttgtattttccatctttggagggatggaaatggtatagctactggtttttactgtgccattttccattctcaccagcagtatacaaggtccagtttctcaccaatacttgttagtttttttttttttttgatagttgataccctaacaggtgtgcggtggcatcaccttgtgttttttcatttgcatttctctgatagagatgttgaacttcttttcatatacctgttggccatttgtatgtctcctttggagaagtgtctattcaagtccttcactcattaatcagacatttttgtcctcccttttgcatcccctcaggactgtgcccctgggtaccacagagggaagctcccagcagggagtgacaggggaccacgccctctggttgctccttgtgtgccctgcagttgcaacaaccacagtgacacctgtgaccccaacaccgggaagtgtctggtatgctggtttgtgggggtgcttgcctgagtttagaagtaaagtggatgctgagtgtcagatttctggtctaagtcatagccgtgccttggtttagtgaggggttaaatttagctaaatataaaatataaacctatttccttgaggacggcatagcttagtggttctgcccttatcagtggaaattcttttataaattttcctttcttgatgaatttatctgtgggcatcaatttgggaattatagtcatgcaccaaataatgacgttttcttcaacaacagatcacatataggacagtggtctgataagactataatactgtgtttttactgtaccttttctatgttagatatagttagatgcacaaatatttcctattgtgttgcaattgcctacagtattcagtatggtaacatgctggacaggtttgtggcccaggagcaataggctctaccatatggcctaggcgtgtagtaggctgtgccatctaggtttgtataagtgcactctatgacgttcacactgtgacaaaatcagctagggatgcatttctcaggcagtatccccatctttaagtgatgcatgactgtagttgcatgccttgtttttaattgcagtactggttgctgtagtgaaaatagatgagaactgtatacgatgaagtttgggggctcacgtgggaattttaaaataagttaatgccagtgtcgaaaatgtatttctctgtgtaaagtattgccctctccttgcatttttttaaaaaatgcatattctctaggggatgataacagcacattattcacatgttagtgtgtgtttgcttctcagccaccttctcttaggccaagattggtctcggggacacatggagagctctgaccactgtaaacgactaagcggcccagacagaagcctcgcagccctgaccgaggacaaattcctgtgtccatgatttagcttaagccaatgaggcagataacaaaataatgtgatattcatttcctactcctgaaagctcatgctttacagtcactcaggtggaaacattgattactaattgttccaagattaactcgccttgggtaaaataatgcattgaagggaaatgagctgcccaccaaggacacacccaaagccttggagatcctgggtgtggcccaatcacaaggaaacactggagccaaaacagaggaattaggactgcaggctcccaacctgcctcccgccacattttgattctggttttccctctttttgacaattcctgtcactgaaacccattataaacaaaaaatggtgtctgggcttggaggatgggatttcagggttgcagtggtccttctattcttgtcagagtcccttcagattttattattattattattattttcaagatggaggcttgctgtgtcacccaggctggagtacaatggtgcagtcagctcactgcaacatctgcctcttggcttcaagcaattctcctgctcagcctcctgagtagctgagattacaggcgcctgccaccatacccagctaatttttgtatttttagtagagacagggtttcaccatgttggccaggctggtttcgaactcctgacctccaatgatccacctgccttggcctcccaaggtgctgggattacaggcatgagccatcacgcccggctgtcccttcagatattaagtctgaactatagcagccgtgccaggcagtaatttagtgtacattttacacacctgcaacaatggggcgctcgctctcaaaacagctctgctcatctttgggcagctctgattctttctaagccagtgcccctgaccatgcatctgttggtgcagttttattctttggagctgttgagataaaccatgagttcagattattcatgaaaagtgatgggatcttaacagataccttgggaaactacttgatcaaatccctctttcccatgtccaaaggccctgaatcttcagccctccaagtcacgtaccctcacatgcctggaggccagatggagtggtcgtgggtccattcaccagcctgtggtgtgcatgtcactgtctgtcttcggtatcctgccctgagcctaacgcctttgctcccggagtcagtgggagcttccctccttaactcgaggtgctgtgtctccatggcacagcctggacagggtagtcatacccgccctgtcactgctgcctcacggcattgactagacacaagacccttgaactcttcccatcaatatagcgcctcagtcccttcttccttgctctttgagctcaggaccttcccttccatcctcagttttttgaatccttttgtggtttagtgcagttcatttcccttcaacataatctcctaagcactccccctgtgcttattgtacaggtagatatgaagaactttttggatctgattttgtcattagtatataggatgttcaggtcactgagcatttggtgttatcataaaaatgattggggccgggcgcggtggctcacgcctgtagtaccaacactttgggaggccaaggtgggcggatcacctggggccgggagtttgagaccagcctgaccaacatggagaaaccccatctctactaaaaatacaaaattagccaggcgtggtggctcatgcatgtaatcccagctactcgggaggctggggcagaagaatcacttgaacccgggaggcagaggttgcggtgagccgagatcgccccattacactccagcctgggcaacaagagcgaaactccacctcaaaaaaaaaagtgattgattggaagtatgacgtggaaggggctggggagactgaggacaagggcggtagcttgggagctcctcttcctggttacccactccctaccactgccttctgggagatacgtctgaacctttttacatcagtgaaatattggcaggcattctctgtgcatttcccatagcaactaattcagcccacactttggttctcattagggggtccttgtttccctgccactcttggggcagcttgtctttgcttctctagggaacccacagtctgtcgtaagtcagggggagttggtgttagccatggaaaacctgaaaatcttcaattctctctcatcatctaatatttattccttgtcaggtttaggccatgccattaacacatttacttttcaagagagagattacaaattttacttctacagagagatgagtttgagaggtcaggtagatcccagtaaaatttatcctcatcagggaaaaaaataggaatagaactttaaaatgaaaaatactagaattttaaaaacatttaaatgaacttaaaatagtcttttttaacatgtaacaagatgtctttctgtatcacctctcactgccaaggataaaagtgtgagtcagcctgggagtttgctcaggggttcctcactgatcctggaaacctattcagctgcatcagacatggaatcttgtgcccagtggctgagtaaatagagatgaattgagcaaatgccaatttcaaattggaatcagatggcaagaactgcttgttcttttagctttaaaaatgtatacctttttggccgggcacggtgcctcacacctgtaatcccagcactttggaggccgaggcgggcagatcacaaggtcaggaaatcgagaccatcctggctaacacggtgaaatcctgtctctactaaaaataaaaataaaaataaattagccgggtgtggtggtgggcacctgtagtcccggctactcgggaggctgaggcaggagaatggcgtgaacccgggaggtggagctcacagtgagccgagatcatgcctctgcactccagcctgggtgacagagcgagactccatctcaaaaaaaaccagaaaacaaaataagtgtaccttttttaatagcaagaccgtaggtccaaaggatgatataaaatttaactggaaatgccacatggggtggctcatgcatgtcgtcccagctacttaggaggctgaggcaggaggatcacctgaggccaggagtttgagatcagcctgggcaacatagcaagaccccctatctgtacaaaaaagttaaaagttagacaaacatggtggcgtgtgcctctggtcccagctactcgagaggctgaggcaggagaatcacttgagcctgggaggtcaaagctacagtgagctatgattgcaccactgcactccagcctgggcaacacagggagacctcgtctctaaaaaaaaaaaaaaagaaaaaaattaactggaagttagttgtgggttgcagtaatctatcagtggtgctctaaaaccatgagttttcttccctcattgtctatttcctaaatcatctatccattcttcaactccttacatgtggttgttgaaccctgcctgtgtgcaaaactggtgcttcaaattgttttttggggcactaaatattttaaatctatgttttaaggttctgcaaactgcttttagggctcctgtgtctattttccttaagaagaatgtactagtaatttcttggctgtattggataaatgcagccttaggatgaatgaaagccacagagcgggaaatgttttcaggattttaagaatatggaggaaaatgctcccctttcctgaagaatatttttaaaagctagctgacataaaacatggcagtgcttagctattaccagataagaatgatttctaacaatttcccattttttcccccctcctttaaatgtgggctcccagaactgtggcgataacacagcaggtgaccattgtgatgtgtgtacttctggctactacgggaaggtgactggctcagcaagtgactgtgctctgtgtgcctgtcctcacagccctcctgccaggtgagtccccacaggtgcagctggcatgctgggctgcccagggctgcttccagttcagcctcattttcaagggtctctgagtggtctgttgttaatgaatattctccattggttgcaaaaggctaattttaagaaaaggtgttcattctcaaaagcattggaagagaatcttttcaaaagcaaagtatctgttttggtattggatgtttggatggaagcaattaaagaaaggacttttaggttttgttttttaagactcattttagcccacagcatatgtatccaatctgcatggagataaattattattaattttattgataatgatacaaaagaacccaattaccatttaagggaatggggttagagtttatataagctggtgcctaagtgctgaaataccacatggtgataaaattgggactagtttctaccttgtacttatgatgcttgtacagaattatctgaatgcaaaagggaaccagaaattttaagtgggaattagaatatcaaagaatcctctttggttcaaatgaaaattataactcatcaataatattttattattgcttagaatatttggcaaggtattgaacatataaagatcaaatgttaacttttggtatactgcaatgaagtattccttttaatatttgtctgaatcttctgttttttattgcctccaagtaaatgatgcctgatggtgagtaccaaatgagaggcactatgtacactttccttgcaagctatgaagcatcctaaaatttgttgttactagtgcttattttttatattaaatgtatatatataaattttgacttgtcaattccacttctgtagtctgtgctatagaaatacttgcatgtgtgtgtaaagatggatgtgtttttgcattgcttttactcatggggaatagggggaaaacggaaatatctacttacggggaattgattatatacattgtgttacattcctagagtgaaatattttacaaacacggagaaaagaataaggtatatctgtaggcacagaattggagaaatggccaattgaagtatgtaattgaatatggagtgtgatgccattttggaaaaaattcatatccacatgtctattcatacccatattataggtggctatatgtgcccagagaagtattgggaaggacattctaccctactactttgcacgtttctgtgctgtttgaatattttacttcttcaatcataaaaaggttataaacatccccaaagtccgcattaataaattaaagtttgtgctatcaggaagagattgtcaggatgtgaacattcttgtgtgctctgaatctcagatgccctaaaacacatgctttattttctacatattttgtttccactgaagtctatccctttactattttaaggaggaaaaagagttggaagtggtatggggctgataactgacgctggaaacttcatcttgctaacgaaaaggaaccagacttggctctaactggttttgttttttattgttgtctccagtagtttgcatgcacccagctcagcctctaggtggcacattggtaatttaaaacgtgaaggcagagggtagaggatgttgagaaaaaggagtaaaacaaaagcagaaatccatgaatgaggagatcaaatcccagtcaatgattaaactttgagagggtctgtcattttgcttatggcagcctaccacataactccctgcctgcctttaggtgcatcagttctccagttctgccctatttccttgcctttgcttccctggcttgccttcctcgcctttcattacagtcaataaagttcttttcgtcagcgtgtgttcagccatcttccctctgctgtttttcatgcttgctcatagttgtttcagctctcttaccaccttatcacttagtaagcaaagaccctttttccttgggacactctcttgttgggtggccaattagtgataatccctaaggtcagtcttcttccacttaacattcacatgattgtccctggacagggtcttatgaatgtcttttggatacaagatgtgtgtgcacttactgattacttttattttccttctttttgccaggtagattgtaagctctaaaaagctatgtgtaatcacgtaactttgagaccagtatggtgtatcctaagagtaatgaataagtaccttaaggaaagatggaaattgtatatctgaaaattcaaaacgaaattcttttcctccagttttagtcccacttgtgtcttggaaggtgaccacgatttccgttgtgactcctgtctcctgggctatgaaggaaaacattgtgaaaggtacatgggtggattgtcatgtggaaatccctgggcactctgtttcttttataaggtattgggcatatttactatagtaatctgggagccattatcaattatcaatttggatgtgcttgattgaaataggacctcattactgttccagaacaagttttcccaaggtgaatggatctgtgctttgcatttcatttggcagaaatgattactgtcgcgagttagaagctggtattgaccatcctgtctgcacctatgtcccttcctttctgtaggtgctcctcgggctattatgggaaccctcaaacaccaggtggcagttgccagaagtgtgactgcaacccgcacggctctgtccacggtgactgtgaccgcacatctgggcagtgcgtttgcaggctgggggcctcggggctccggtgcgatgagtgtgaaccgaggcacattctgatggaaacagattgtgtttgtgagtatttctcctctaaatgtgtaaagatggtttttcctcccaaatgtgtcgggaaagaagtggtgacggcacactaaagtgtctgcagaataaaaacatcctattttattttcattttcttattttctaagcatagatcactgttgcatctgctgaactgaacctttcatcatgtgttttccagctgaggcaggaggttctaagatagcagtttattcctctggcactcagagcagcacagtgatttcaactttctcgtttagtggcattaatatttcctttagtggagccaggagtgatttagtgcaggagaggaaacagctttgtggggttgtcatttgtgttaccccaatttcatgatagcttccactcgtgactatcatggatttaaaaaaaaaacaaaaacaaaaaaatggagtcttgctctgtcccccaggctggagtgcagtagcacaatctcggcttactgcaacctccgcctcctggactcaagtgattcctctgcctcagcctcccgagtagctgggatcacaggtgtccaccaccttgcctggccaatttttgtatttttagtagagacagggtttcaccatgttggccaggctggtcttgaactcctgacctcaggcaatccacctgccttggcctcccaaaattctgggattacaggcatgaaccaccatgcccggcctgttgtgggcttttgtaaactttttttccagttctgatttattctaccagcaagtgcatgagatagtcagcttgggatgtcttctcaggggttaatggggaagatacggaggcctgttaggaccatggcattggaggtcttttttgctttgacttttgtgtgggttataagcacacacacccccactattctctccagtgtccttcacttgtacttgcgaaagatgcatttgcaaactgcctgaggaggtgacagagcaggctgtggaagggaatactgggattcagtgcagtgggtcctagttaaagatgagccaggcagcataaagatgggggcagaagaatgaaatgtgtgccataactccctgcctgtctttaggtgcatctgttctccagttctgccttacttccttgcctttgcttccctggcttgccttcctcgcctttcattacagtcaataaagttcttttcgtcagcgtgtgttcagccctcttccccctgctgtttttcatgcttgctcatagttgtttcaactctcttaccaccttatcacttagtaagcaaagacccttttgcttaccgggcgcccctcttggcctcagctgtttctttctgtgtgacctctcggaagttacttatctgatctgagtcttggcgtcatcattgaataggggcctagcacttcctgccgtgccacccatggcacagttggagtgagaacgagatcagatgtggtgcacggggtcttggagtgtactctgaccgcatatgtcattttcacaaaacaacttacgcaactccatgaaaaaatgggcagaccacatcgcattaactttaactctcctttttaaaaatttgtcttgtagcctgtgatgatgagtgtgtaggtgtgctgctgaatgacttggatgagattggtgatgccattctttctctgaacctcactggcattatccctgccccatatggaattttgtcaaacctggaaaatacaactaaatatctccaggtaggtactggaaatacagagatgaacagacacttgtatcattaagggatatagtcagtgggaatggtgggagtcattccatgtgtcctccccacagtgtgagagcccaacttccatcagcccctgagggcaggtgtccagtctttccttgactgtgaccagtgacaggcacttacttacttatctcacacgctagcttgtttcacggtgggacagctctcattgtttcagtgctctctggaggactcctcatcaatgctgccctctgtggccctcattctgccttttgggataagaccaagtccacttgctcttctgtaagacaactttgggtatttgcaaacagctgccctattagaaaagcagaaaataggccaggcgcggtggctcacatctgtaatcctagcatcccagcactttggggggccaaggtgggcggatcacgaggtcaagagatcgagaccatcctggccaacgtggtgaaaccccatctctaccaaaaatacaaaaattagctggatgtggtggcacgtgcctgtagtcccagctacctgggaggctgaggcaggagaattgcttgaacctgggaggtggaggttgcagtgagccgagatcacaccactgcactccagcctggcgacagagcaagactccatctcaaaaaaaaaaaaaaaagaaaaagaaaaagagaagaaaagcagaaaataaatctgaacagtatcttctttaaggtatattattttttaagtgtattattcttcacttcactaaagttgcagggcacaaaaactctcctccctggaagactacattaaatatctggcagtaaatcatagttttatgttttcatcaacagggcctgggtcaaaaaatgatgaggagttaagaaattaacttagtagacagcatcctactatagcacttatttattattattattttatttatttattttattatttttttgagacggggtctccctcagtcacccaggttggcatgcagtggcgcagtcatggcccactgcagccttaacctccatagctcaagggatcctcctgccttagcctcccaagtagctgagactacaggcacacaccaccatgcctggctagttcttttatttttatttttaatagagatgagctctcactgtgttgtgcaggctggtcttgaactcctaagctcaagagaacctcccaccttgacctctcaaatttctgggattataggcatgagctaccacgcccgacctacttttaattctaattggaaaacaatgtgattcttaaattttgctttatatatgcgttagaatttgacataatctatgcggtgcgccaggtagcaataaaagggatggccattcctaaatgccttttcttagataagagttttcctcaaacttagcacttccttaggtgtgtgcgtgtgtttatgtgtgcgctgggatggggctggttcttgaatccatcttgatttgcagtggtcttttctctataatggtagttaagaaagattagggacctctaagagatgtttttatgttatactttcctcaaacgtcacaaagtgtttttgaaaaatgagagcttttacctctataaaaaaaagaatatttaacttttttttccaatgactatatacacgatcagtatattatctgccagtcttggtcccagggatataactattttatatatatgaaataagacaaatatttgatttaaattttaactcattttgaatgatttgctctaaataaaccacttgtccgttttctttaaataactttttgtgtttatgtaaagtattcatcaagttttaaggtttaaataaaattatacaagaaattagaaggctgttggcataaattaagcactttattcttctttatttttagtatttataaagtctttctttattgaattcttttgtagtttagcctaaaaggcatttttttcttaggtgttgcaattatagttaaatttgtttgactctgctattgagataaagccagacttttatctgagaattgcagcagtatcagattctgctgaacacaacagattttaaatttatatctatatcagaaatataatgcaaaggatggcagtgtagaatcatgtcgctatagtcgaaacctaagtaaatgtgatccatttttttttaaatgacagttccaaggaaagaagaatttctttctgtgaacaaaaaagaaatgcaagtgcttcttagttaagaatcagaacattttacttcgaagcattgtaatttgtttcctccattcttcctaggaatctttattaaaagaaaatatgcaaaaggacctgggaaaaattaagcttgaaggtgttgcagaagaaacggacaacctgcaaaagaaggtaaattctttccataaccaaccaaccttcctcctggtccctcccatcagccctcctgagcagttgccttggggctgtctggaaggttctgattagatcatgccagcctcttcctcccacgagctgtgctccaggtacttaatcatcaaattggttttgaccctgccagtttctgtggtttagtgggaaaaggctcccgacttaatgtctgttgtcatctctgctgaggacagagttgggcagtctcttggctctgactttcattttctcctctgaaacaaaggtggggcggggatgaaaagattgctgaggtttcttccttctcctaaattcattcagtaacgaagtacacggtgagcccaaaagcacggactgaacatcagtaatgctctctgcagcttgctgggtggagcagggagggcacagacctcatgatgaggcgtctgtgcaaacttcaggcttcaggctggggtggttctgattttagggccctgaatggcaagtgagcttgtttttctgtcatcagggaattatttattctgtttagcctgtgccagaggaatggcatttagtgacctaaaaaagaatctccccttctgcagatggtgaggaaggattattgtcaaatttactgttttttcatttatgaattttgtatgtgtgtgtgtgtgtgtgtgtctgtactgtgatggtgtatctatacgtatggatgtctaatctccatcaacacatgcacacatacacaaacatcaccctaggaagtatagtttggctcctgttaatttagaattaacgatgttttggaaagagttgaagggtttaagtttgggtttaagtacctcatcaagcaaacatttggttggaaataagctgattaaaataaattctctgtatccgttaaagaagattctctttggtcttgactagaaaacaccaaactcagactgggttactctacattcttggaaattacaaacaacctttcctttaacaaagagtaaaaatcccagtagaaataacagctgaggacagctaagtgtcagcctctgggctgctgacttcctggcttttgtcttgtgtagttctcgtagcagccctgggaggtaagcgttgctgtttcccaagtgttacggacaatgcttggagatgtctgggcctgtccacagcctggcagaatcaggtctaaaatcagcttgcctgactccgtgttcttaactcctagagactaacatctcataggccatacaaatcagtaaggtttactttctatattctgtatatttgggttttaaagtgaatcgagggccctcacagtatagccactaggagaatctgtagtttaatacacaattagcctgcttttaaaaacatacccatcttttcttatgctgagtgagttgtaaattatttcattaactacttagtccatttctaaccccaaaatattaagctcagcttgcatgataatgctaatctttactctatattctggaatatatgttgttgcttataagcggcaacagtggaatattacaacttgcgtattgtttaaagtcaaactaattacttaaagtcaaactaacctgagactttatttttccaccagctcactagaatgttagcgagtacccaaaaggtgaatagggcaactgagagaatcttcaaggagagtcaagacctggccatagccattgagaggctgcagatgagcatcacaggtagtgtgggcagtgtctagtttgaagtatctgtgcttatctagtaagaagtcaccattgctttattaaacatatgaatggatgtatatctcttgcatcgggtttccggaaccagaggggctggaatagtttggggatcctgagatgtgcaaactttagtctttgactgagagttttagctttaaaaaaatgcatatttctctttttattttctgcattatgcctaaaacttagatcctaattctcaagccctgttatggtaaagttagtatggtagctctccatccatttgcccagaataggagctgacaggatttgggacttcagttaggtaccaagtatagccatcatattagaataatttaatcacttctcagttgggtgtgctgtggcttttagcatgctattttcagttttctggctaccagaaacatatgatcgctcttctttttgtattatagtataagggcttaaaaagtacagaatccaataaaaatcagactttatagggcaaaaggtaaggaaattattagaacaaagtatgcttaataaaaaaagtaggatcaagcattggtggtttatttatgtagtaaatatttattgagaacatttatttttcatgtgcagatgtctctgccaggtacaaggaaatgctgaggttgacaccatgtccttgcctttagggagtttattggtgcatgagaagactttgaaatagaccagtaatcccaagttcatgaatgtttagttaggggatgtgcagagtacactgggatatgccaggtggcctggcctgacatggaggtccaactcagcttaggtaacagagcagtcctcagcagagaagtttctaagtttttcacttggtactagccacttttgagaggcttattaaataattgatgaattttctccatagaaattatggaaaagacaactttaaatcagactttggatgaagatttcctactacccaattctactcttcagaacatgcaacagaatggtacatctttgctagaaatcatgcagataagagacttcacacagttgcaccaaaatgccacccttgaactcaagtaagttcctaattactgttcacaatgcaaccaagtagagagagaaacttgcacgctatctccaaaggagaaggaggcatcgtggaagaaaagtgctcactggaaatgaaatatcctaagagaggagaaggggccctgtggtcaagtaaatgaagagatgggtactgacccctccaaatatagaaaggtgtaatctgtgcagtcagtgtaatctatctttgtgctatcatgcagtagcttctgtccttttctgtgattccgggatgtttccacctagcacaaacagcagagcctcatggtactgtagatcaaggataaggcagtaaactctcatagaaaaaaatcgttggtggccacccataccatgaactctaaggtcaatgttatgccagaataattgagctcagttatataaaaaagtacagttacattgaaatacacaatgtgaagtgacacagagatcacaaagcattcttacatacagtaacaaggagtttggagtttcctttccagcttttatcttagcattttcacacaggtattacttgatatactagcacaggctgtctctctgcaggttgtaatgaatgtctgaagtgctgttataaatagttacatgatactttattaaaactctactctggatgttagtatctaaactgtaatcagatgaaatgatatagtcctgtgagatatttaaactttaatattttgctattttaaattatgttgtgagggacttcttatgcaaatgttttataacttttctatattgaaatatcaaatatttatttatactgtatatatctcttctttttctgtatttcagattattatcagggtagatattaagaagtagaattattggctgggcgtggtggctcatgcatgtaatcccagcactttgggaggctgaggcgggcagatcatctgggttcaggagttcaaaaccagcctggccaacaaggcaaaacccgtctctactaaaaatacaaaaattagctgggcatggtggtagacgcctgtaatctcagctactcgggaggctgaggcaggagaattgcttgaacctgggtagcggaggttgcagtgaactgagatcatgccactgcactccagcctgggtgacagagcaagactctgtctcaaaaaaaaaagaagaagtggaattatttagtcaaagaatttgtgttttgaggattcctaacatgcacttccaaataattttttttaatattttttaaaaacaatgttcactgccaccagcaacacactctagagggttgagtatgtgtcttttttcatcatagagcataatttttgatgttgttgatttgttaggtgaaaaacaaaaggaggtgcttgcagttggatggagtttggagagaggactagtaatctaattactagaataacagggcctggaaagggctctgagagaactaggatctaaaggccttgcgcggagggaatgagaagaggacatggtcctgggagatgggcgtgagcagctgtctgtggagcccctcctctgtgccaggagagtgccggcttctcttctcacattgtgttctgtgatcatctcagtctttccaagtaggggagaacccagttggggaaactgaggcccaaggaatataagtaacttgccctatgttaagcccccgggacaatatgaaacctgaccataaacctgaatctgttcgagtctaaaccctattattttcccacccagaacaaaaggaagtaccatttgagaccccttccataaaagatgggcaggtggaatttggacagtcggagacatcgagggcctttcaggggcggggaaacgagatctcagtctagcataggtggagagccattgaacaagggaacactggagccaaagaagctcagctgaagtttgcatcgaatttgagaggcaatgggtagtggtgacagaagccaaggtgcgaacgttagtcctgcagccccgaatgcacactgaggcttcagctgtgctcttctcgggcagctccaaccggggcttcccaggacctgcccaccctggaggcgatgcccctgggtggggctctgctccctaaccttcctcagccccccacacatctgagttggtggggagcatgtgaaggatggagattcccaggcccaccctgcagatcctagagaatcattttgtggggctgtcccctcccaccgttacccttctgaggtcagttcattcattcattcattcagcaaagtgacctgaaccctggttgcaagcattgtgccaggagttgggaacgtacaggggaacaatagagccttttgcccactaggagctcctggtcaatttagggaaagtttattttctgaatatgcactttaaatacaataagaaagtttaaaatagaggtcaaattttcatctataggatgatgttactatctaaaccacaatcacatgaaatgatatagtccttaatgacttgaacaagattaaccaccaaaaacaaaacaaaacaaaaaacccagcactcttcattagcttcttctagcaaaattgacagaggaaactggtgtttctcaagctatgtgcctctataacactagtgtcgcatgaactcctaggcagattccttgaacaaatattaaccttcctaggatctgcaaggcgggcctgggactctccatccttaacaagctccccagcaactcagatgtgtagggggctgaggaaggttagggagcggaacccagccctgggacactgcctccagagtgggtggttcctgggaagacctggttggagagacctgaaaggaggaggggaggcagggccagcccccacccctacctgttcccctcagtgcctcctgaccctcccctactggcgagggcctctaggacccctttctctgtcactgcccttctgatttcacttggaataaagttattaataagattgctgatctctctaatttgtaagttaaaatattactaaagagaccttttattttaaaaatcaagagtttaaaatgtattctctggcctccactttctgattttccatagataatccctatatatatgccatttcaaaatacatggattattttaggaattatctgctttttaattataattcttaaaaaattggtagttcatgctgaagcatggcagttgtatagatgagaagtttagcacacagactgattgcttttcatgctgggtcgggtgtctctggaactaacaccacattcagagtttcaccaggacccccaggattcagcatataactgtacttacggctaagatttattaaggaagtccagccagatggaacaaaaggacacagcagagtctggagaaatccctgaagtcctctccccatgtgggatcccagagagcactcctcccccagcaagaaaaatgcagcaacatgtgtgtgatgtttctgcccagggaagcctgtcagagatgcagtacccagggattttgttggagctgtactggtaggcaccctctgcctagcacacagcaaaagtcgactcccagaaggaaagcaggtgttcagcataaaacatgttgcttgcacaaacagcccaggtagtgagctactcttagcagttagggatcagtgggaacgcagcccaccttgccagcaggcctttcaaaggagagcggactccagcctgccacgttgactctttactgcacacttcggattattgtttgtagctgtttttcaaatgatttccatggtggtatctcagacctattaaaagatttttttttttttttagttgagacggagtctcctctgtctcccaggttggggttcagtggcgtgatcttagctcacttcagcttccgcctcccgggttcaagcgattctccctcctcagcctcctgagtagctgggattacaggcacccaccatcatgcccagctaatttttgtaattttgtatttttgtagagacagggtttcaccatgttggccaggctggtcttggacttctgacctcaggtgatctgcccgccttggcctcctgaagtgcggggatacaggcatgagccactgcgcccgaccaaagatacgtcattaaagaagcacattccaagacacagtgtctactaaggagagacacgttctgtactgcaggtcttctcaaagcttttagtacattgacgcacatcagcagccccgtggaggatccggctcacttctttcaccctggaatatttgttcaaggaatctgcctggcagttcatgggacattggtgttgtagaggaacatagtttgagaaacaccagtttcctctgttaattttgctagaagaagctaatgaagtgctcagtggggtttttttgttgattaatcttgttcaagtcattgaggactatgtcatttcacccgattgtagtttagatagaagagtcatcttgtagatgaaaatttggcctctattttgagctttcttttttctctttttgagacacggtctcactctgtcacccaggctggagtgcagtggcgcaatctcagctcactgcaacctccacctcccaggctcaagcgattttcccacctcagcctcctgagtagctgggactacaggcacgcgccaccatgcctggctaatttattttaaattttcttagagagatatcttatttaataataaggaataatagattcatgatcagacattagaaatatattgggtttatttgtgttttcttatgtatgtgttttagttcttgttgcctgctcataatgcaacgtctttattatcattaaaaattatatcattaaaaattataagtgccgatgttattctaataatgtcagagttcaaattcataatcttgaaaaatgtttttggtcgtgtcttaacccagtgacctgatacctgtgaaagctgagggtgttttacagggcattttccatagaatttttcaaagttgtcctgacaaattaaaatgaagagttaataggatatactccactactgcaaggatttgtagcatgaaattttattattctatgcagctataaattcaaaattgatttaaatcagcaatttgatggcatatttataaagacataggaaaaaaatcttttggtattctaaagcttgcatttatccgtggtacaaatcatatctttttgtcaatttgaatttgaaagcttttatgaaatctgtttcttcttaactagctgcagaaaatccttttatcgtatatataaattggtaaattcttaacaaatcactgaatagctttctttcaatttcttgctgtattatatataatgaaagattgcagttcccatcaacacagaatgttgtcccaatttcctgaatccagattcatggagatgatcttttttaattccattactaaaatgtattagaaagtttaagtgttcggattcccacaaagcccactggacccaagtttaccaggaaatttggggaggtggggtttaatgagcttcatcatttatgaaatcatcagagctgctgataaaagaagtaaagctttgggccgggcgcggtggcttacgcctgtaatcccagcactttgagaggccgaggtgggcaagtcacctgaggtcaggagtttgagactagcctggccaacaggtgaaacccaaaccccgtctctactaaaaaaaattagctgggcgtgatggcaggcgccttaatcccagctacttgggaggcagaggcaggagaatcatttgaacatgggaggtggaggttgcagtgagctgagatcaagccattgcactcaaacctaggggacaagagcaagacttctctcaaaaaaaagaagtaaagctttgaaagcttcaagacttgtgcctgcttgtggtcatcctaaccggcttaacttgaaatacacatgagatgaaagatcaccatgcctgtaaatttcagcaaactatatgggaacatggaacatcactgtgcacttatataagtaccgtttacttcctgtcatgaataaatgtatctgtgagatgcaccactaaaaaaaaaaaaaaaaaaaaaaaaagacaatttgttaaggataaaatataaacctgccatacctgtagctatcttagaaaaattgtttccattcttaagaagttatgatgtatcacttacaatttcaaaaagagactaggcataaatatgtaaaaattttttccactattatttcagagataggagctttgttgttcatttacttactatgtgaaccattcatatttatcagggctgctgaagatttattgtcacaaattcaggaaaattaccagaagccgctggaagaattggaggtatcgaaagaagcagcaagccacgtcctttcaaagcacaacaatgaactaaaggcggctgaggcgctcgtgagggaagctgaggcaaagatgcaggaaagcaaccacctgctgctcatggtcaatgctaatctgagagaattcagtgtgagtctcacttgctctctccttctcaattagaacaggtaacaaaatactccaacgtaagcaattaaaagtgagccctggcctggctgggtggctcacgcttgtaatcccagcactttgggaggccgaggcaggcagatcacgaggtcaagagatcgagaccatcctggccaacatggtgaaaccccagtctctactaaaaatacaaaaattagctgggcgtggtggcacgcgcttgtagtcccagctactcgggaggctgaggcagcagaatcgcttgaacttgggagatggaggttgtagtgagctgagatcatgccaccgcactccagcctgacaacagaatgagactccatctcaaaaaataaaaataactttaaaataaaataaaagtgagtcccatgcactaacttctgcatgtagcattaggtaccaaaggtcagaagcagggttgcttttatgaagcacccttaaaatgccatttctgctgcaggataaaaagctgcatgttcaagaagaacaaaatctgacctcagagctcattgtccaaggaagaggattgatagatgctgctgctgcacaaacagatgctgtacaagatgctctagaggtaaattacatctgagcatggccacaatacagtttttaatgaatcttcacacatctcgtctatatgcacacatatctgttattaagtagatgtgcatatatttacaatattaatttctccatgtagcacttagaggatcaccaggataagctacttttatggtctgccaaaatcaggcaccacatagatgacctggtcatgcacatgtcccaaaggaacgcagtcgacctggtctacagagctgaggaccatgccgctgagttccagagactagcagatgttctgtacaggtaggaacacgcctttgtgggaactcaagagcttgcagtctattgatcggagaaaacaaagatggatgtttctattcacagtgatgggtcactcttcctttgtgtaaaaatgagcactcctgttttattaacctggcaagttggatttccttgtgtctgctaacatagtttaccattggcctacatatatggtggaaaaatgcgaataacaggagaagacttaaaacacataatatgctacagtataatattaatataataaaacacgtattatgctacagtatcaagccatcaaggctttattaagcacctactgaatgctcagggctttgttagattgcaggtggaacagaatgaggttattaatttctttacagatcttgcctttttggagtttattatttggttggaggatgtggctgcccactctctacctatagaagtgttgggagtctcttttccaatccctgagagataccacctccaattattttctactgcctgaaagtctgccattgtaatacaattactttaacttatattttttggatatttaaaaaatatgtactcaacttgctaaaaattcctttaaacgagaagcacaattttagccagccgtttcaaacttgtctgcacattggaatcacctggggagcttcttaagccaccgatgcctttgtcctttagctgccttccccccaaagattgtgacttaatgggtctggggtgtagggttttgtgattttttgaaaaccctcaggtgattctaatgtgctgcaaatgtgggaaccaaaagttttaggtgttatcagtgatttacataatactgtgagttaattggtaaattcctttctttaaaatttgctatgcgttatgggtgacaagtctgaccacgctgggaaaatgtatgttcttgtgcatgttctgtggaaggggaaagatgcgtgtctccttattggaaaaatgctgacataaaagattagttcacacaacaaaagcaattaaaaatcgtataagatagaatattgcataaattatgtgctaaattgagtactgcttcctaatatgtcttagggatcagtagtggaaaatggcattagataccagctcctctcttctcatcagttttcatcatttcccccaaagagaaaaaaatattctgactccatacctagctaaaacaaaacctttattacttcatatgagtaatagaaacaatttgttgtgataacacaaagttaaataattatcttttatttataaatcacagaattttgccagtccaatagtaacaaacaatagctgctaatattcggtctgggaattgcccgactcaataaccttggaaagaaaatgaagtgagttactcagcaggcaaagatgtgcccattgccagactttattttcaagacagagagcactggatgacattgtgccattaccagttaccaagttcctaagcaatgtgcccacttgttagaatgatgttaagctgattgaaatattagctgatcttcctccaaaatctctagtgaattttgtaaaattgtcatatgccatttgagggataagattcagcggcctcaggtatgcttagaaacacttcttggaggttaccaagtatgttgcaggaagcttataaccaatgcaaacatgcagtggtgccctagacatgcgcaggggattggaacagagattgaggaatgctgagggcagctggtggaaagtgatgaatggtcgtctaagggaaacagcaatagtctcttcttgggtattgattaaatagcagttctgagtgttattatgacaaagtggctacggcttctcaaagattacttttgaagttacatgggaacccataggttgttattttttatggatgatactcttctaaggggaaagaagataggaggctttcaaaactagtaggcatttatgatttttgtgagtgaattggcaagtttgatttagtttatcataacgtatctaaatatgctgctttgatagtggccttgaaaacatcagaaatgtgtccctgaatgccaccagtgcagcctatgtccattacaacatccagagcctgattgaagaatcggaggaactggccagagatgctcacaggactgtgactgagacgagcctggtaggaaacgccgtggcttctttttctgggctctgtgggagatttttctgtaccgggtttgagcagagatttagtggccccaatttctgcctattaacattcttttctggtggaatcggtttctggcttctgtcatcatatgatctgtgttttaattttttaaggtcataaatacttctttatacagactagaaaccagtgtggagatgagaacaatctcacatttccttgcgctaaaaatgatgatgctacttgatacctactggagacatttttctataaccatggtgaaaatctttattgaatggctggtttccttccttatctacttaaaaatgtctttgttttctcttgcctcagccattttaaattgtccctacctggtacctggctgactttcttgctgggaatgtgtctgggggctactctgatggagtcacttcctctgtccccagcaggactccaccctgccctgctctcaccatgcttaagtggttctgttttccagctctcagaatcccttgtttctaatgggaaagcggccgtgcagcgcagctccagatttctaaaagaaggcaacaacctcagcaggaagcttccaggtcagtatgtggctcggacggtgtagacaggcagagtgagcgtgagcgtctcgctgagcagcctctaagaatgttctccttgcatgcagcaacttgaagcttagcatttctgtgtcccatttatattccaatttcctatcatataaattttcctatcgtataaacttcctatcatataaacctcatagaatttggcatttttattctagtgatatctgttcctttattgtgcagtcatctctatctttaacctgtccttaatcctccactcattgccttagcttggagccttcactgttcttcctagtgtctgctgggttatctttgattgcgtgtgctcctctagtttttccttgaggagatgtattatgcttgatatttcttttacctttctcatgggactaatatcatgttagactcatagtaggttctcgtttaatgattattaaattaaatcctaattgatttagccatttttcaaaaaatacctacgcagtttagtttgtgctaaagtttcaacaaagaatgacttggcatatgtaagagcaatccatccaataaacatgaaccaaagtggtagcaggaatctgttatgtaagagaaactatgtaggcctacaattttttataacaaataatgtgctttccaccttaatatattctaatagatcaaaaataccaagatttctggaggagtaaatagtgggccaggcacacagctcataccctttacaggtgacttacttccgagtctaacactggatccttccacagctgtctgaactaaaggcttggatatgtacatagttttttttctcattgagtgacacagtttaaaatttatgttgtcatctcacagtatcgaaaatgcataatgtgttgatgggctgtaatttcagtctgtacaactagaggtacttcataggtagtgaaattgggagcttgctggcaattaaaatttcacgttttaaccatgtgctcaaaatccaaatgtgattgtatgttatgaacagaaattttaaaagtaaaagctgtgatcaaacttgagaaggaggttgagttgagttccagttgggtggccagaagggaatagtaggggatggaggattggccagagatgcaggtgggagactgtgaggaagacttccaggtaggagcccaccctaggggttttacaacccagaggagaaaggtggccaggattcagatgggaatagaaagttagtgtgtctgattaacactgagtgacttaaacacagctcttcatccttgagctctagtaaaattggacatgaaatttaagtagaaatattagtgaacaagtcaacaagcaaagtagagaaaatgatcgagcaagctagaaacacattcttaatttcttttttttttttttttttttttttttttgagatggagtcttgctccgtcacccaggctggagtgcagtggcacgatctcagctcactgcaagttccacctcccgggttcacgccattctcccgcctcagcctcccaagtaactgggactacaggcgcccaccaccacgtctggctaatgtttatttttatttttatttttatttttagtagagacggggtttcactgtgttagccaggctggtctcaatctcctgaccttgtgatctgcctgcctcggcctcccaaagtgctgggattacaggcgtgagccatcgctcctggcccatactcttaatttctataatgagtggtgctcagtcttgctggaaaaactgtcaatattgggaatctctttagaaagctatgaattctgtcgatggtcaagaatgataaagctgttgcctaggcaacttttttgcaggctaacctgaaaggaaacatttttctccctttaaataggtattgcattggaactgagtgaattgagaaataagacaaacagatttcaagagaatgctgttgaaattaccaggcaaaccaatgaatcactcttgatacttagagcaattcctgaaggtaagtggaaaggactttcttctgtaaataacgtcttctcattgtaaaagcatcactcaggagcataaggaagtcctgcctcaagactgatcagggctttagctcaaaaatgagactaagattggcaaaatttttacttgcaaaggaatatgatttagaaatgaaaatcattggtttttaaaataacatcacaatacttgcctcaagctactagaattatagtcttaaaaacagagactgcatagtatctgaattgcttacttttgaaatgggcttgacacattgcttagaggaagaaagaccattgaaagaagtcagcaagtaaagaagctggaatgtgctttacctgcctaaggggaaaatgccagattcattatcagtgtggcaaactgaagactgcttgcttggccatcttcctcagtgaggcagtaaaacattaggctcactgatcactttaatactgatggtttagaaatgtggtattcatgaaatttttgggggggtctacagtaattttattgtaacagagaagccaggccgcaataagtctacatgatcagagcagatggtggttctgtccagtgggtgaagcctgaacccggctagcagcacacattttttgagacggagtctcgctctgtcgcccaggctggagtgcagtggcgcgatcttggctcactgcaagctctgccccccgggttcacaccattctcctgcctctgcctcccgagtagctgggactacaggcacctgccaccgcgcccggctaattttttgtatttttagtagagatggagtttcaccacgttagccaggatggtctcgatctcctgacctcgtgatccgcctgccttggcctcccaaagtgttgggattacaggcgtgagccaccgcgcctggcctaaagttttaaataggataatttttttatgtgtaatacaaatgaattgtgctgcacctcaaacttctcttttgttcttttgttgttttttactttgaaaatttcaattgttttatagagaccacgtcttgctgtgttgcccagattggccttgaactcttggcctcaagcgaccctcttgccttggtctcccaaagttctgggattacaagtgtgagccactgtgcctgtcctcctttttttcttaataagcatcttttgaaaaagtcttataaactgctttaaagccattaaaaacaggaagccccgaagtcctgtttgtaagcatggaagttacctggggaaactgggcatgctgcgttgggcttacttcttaccttgaaacaatggagcattttctgatctggaagatttttttttttccttttctttttttataaggatgccatggtatattttgactaaatgcttaataacatttttatttgaaaataatttcgagcctacagaaaagttgcaggaaaagtaaaaaggccacctgtataccctttttccagctttttctgctgtaaatgttttgccccgcttgtgattaaatgctttgaaaatgaatgatactgtcttttaaaaatcctcacccagattttctagaataactgaattccaatttaccttgagtggctgtttgggctttattctgctgttacttctagcagccagttgatgctatgggcaaatacctcttcctttaacttaagacattcccaccttagctgcagacctaggatccaaatccttattatccagacatgaaaggaggtggagaacatgtttcatgaagctgagaagggagtgatggaaaaggacccaaataaagaagttcagcttattaacatgtaagacacagctcacacagcgattggccattacttttgtgatctcattgtgtattgaaatcatattccagagaagtattaacaaaaattatttcatttgtccctaaaaggggatagtagagcatatgatatgcagctttaatattgccattagaaacaagaagctcttagttcattgaccactgcccaaaagaaaaaaaagcaaacagacaagcctcagtttgtgttcagcatcagtaatatgacaataatatatttctgtgcgaaattacatttgttgtcgttttattcttttctctgtgtgtaagcaccagaagtgcatgcttttatatacatttattttaggtataagagacaagggagccaaaaccaaagagctggccacgtctgcaagccagagcgcggtgagcacgctgagggacgtggcggggctgagccaggagctgctgaacacatctgccagcctgtccagggtcaacaccacattacgagagacacaccagcttctgcaggactccaccatggccagtatgtcagcgcccttccttccagtcatgatcgtctgcgtcatgcagacgtggagctagctaagcacacagtggtgcgttgttcacaacattcctgaaaagtagaagtatgctaacatctggattagcctttattaagagaaggaccttgggaaatgcatgctacttgtgcagttttcatctttgtaccacaatgtcatggctttgattgttagggtgttgttttaccgagtgcattgttaatggacaattaattatcttgtttttccctctccccaactttcttgccaccccttgccttcttgtatttgttagctctgttggctggaagaaaagtcaaagacgtggaaactcaagccaaccttttgtttgatcggttgaagcctttgaagatgttagaggagaatctgagcagaaacctatcagaaattaaactgttgatcagccaggcccgcaaacaagcagcttctgtgagtttggggccccgtggctttcgtaactgggctctcagtcatgtggggtcccagggaattcatgcagacatggccgtcagtcacactgcgccccttaggacttccaaagacccagatcccaataatctgggcttcctcatagccctgtcttggtatgtttaaagccaataactagctcattttctttgagttctgcttttgttcagcatgcttcaaaatgttgttagcaaagagatttccatgtctttatggagatttatcattatagactaaatttaaaactattagcctggacagtgcggaacatgtcaaatctacgtgttaacatcactcttaagtttatgggttgcatgtggtgttagttcttcgttttaccaacttagttttaataatccaagtattccttaaaatgtttgtgtagtatgggcctcatccttgaggtgtctgagaaaacagtttgtatgcaacgaaggctgcacaaatccaggtcactaaatgcctgaggcactggacacctggagcagttcacacgtgagaagatgttttacccatggcacatggcactggctgtgccctaagggaaaaagtttccttttgagagaatgtgcagtcgtcatgtgattggggacttcgagaggatgaatgcagcctctgggcttgcatttgtccacctgaggctttctagggaagagaaaggagcacagggctctgtcttttccaaaacctcaagtgtccttgctactggaaaaggaatgttggtttccatgagctctggcttgcatctgtttcagttacaattgctaaataaatacaggctgggcatggtagctcacacccgtaactcccacaatttgggaggttgaggtgggaggattgcttgaggccgggagtttgagatgagcctaggaaacataataagatcctgtctctactaaaaaaaataataacaataaccaggcttggtggtgtgaacctgtagtcccagctactcaggaggctgaggcaggaggattgctcaaggagttcaaggctgcagtgagctatgatcacgccactgcactccagcctgggcaacagagcaagaccctaaataaataataaataaataaatgtaagcccaaggaatgcttcttgatgctaggttaataccaaacttagactctttaatgtaagatatatatgcaacgaattactagtcaaagaaatatgtagtaagtgcaataattgctctataaatatctgctgagtgaataaatatattacctctccatttattcaatagatgattatcaaataccctctttgtgtcaggcggaaagattccaaggtgataagatccttgtctttaaggaattaaatcttatatgagcaagacagtttcctatataaaataacttattaaaaactaacactgattttctcatatttaaacacttaatgaaatcatttttgttaccatctgatatgtcacttcatgaaacatgaaccattgtgtattatcaagagaggaaacctgcctcagtgaaaattcattacagaatagcattgttgagctgctggtgagctgccggtgtgtgtcactaaatgatggggacactttcgttttccttctacagattaaagtcgccgtgtctgcagacagagattgcatccgggcctaccagcctcagatttcctctaccaactacaataccttaacactaaatgttaagacacaggaacccgataatcttctcttctacctcggtagcagcaccgctgtaagttatggacctttggaaagcgacactgaatcctttatgcacttctagatttttctgaattttcacttatttggcaaaaaaaaaaaataggccttagtgaagtctctaaatctcccatagggactaacctttgttaaaatggtagcattagatgaaaaatgaacaaactaccaaatggaatgcctgtgagaaggaaagtgacgtttctgaaggatgccatcttaattgcaagccttggggatggaacttttttgtgattcccccattgacccctggagtgactgagtatcagaatgtcaagcttctgtcaggtttttcttgccaaggattccagtggtctccagatggcaagtgcctatgaaaggtcttcgataccttggctgtgccagtgagaacaggtcagaagcctggggtgtgtagggcagaaaatgttaacgggcacatatagtatctgaaatgtcttcaggagatgagatgcaaagcgcatgcaagtctgtgacgggggtgggacctcatggctcctgtcttactgcatatttcacatccatttcttacctcggagactgggcaaatgagcaagctcagtgccttccctggtgctccctgtggactgcctgtgacctgcagcgaattttcctggggactctgtgggagacattgaggagggccatgccaggcacgcagggaggcgctaatgtccccggggctgtgagtcatgccccagctccagggaagggaccatttcaaacaaaagaaaatagatttggggggtttgctttttatgtatttatttttaagaaaagagaaaaccccgtaagaattgactctgtaaagtgttgtggtggtcagcaaacagtccagtgtgtaaactgatccccgttcattcctcgccccccagtctgatttccttgcagtggagatgcggcgagggaaagtggccttcctgtgggacctgggctccgggtccacacgcttggagtttccagactttcccattgatgacaacagatggcacagtatccatgtaaccaggtagaagagaatgttctctcaaagcagctctcttttttaaagtgtgtctcataagtaattacatgcttgtaacatcatataataggctttgaaacttctggaaagtcagattataaccaaacaatacttggtttaggttagctgtagaaataagcatttgtggccagtggctcacacctgtaatcccagcactttcggaggccaaggcaggcggatcacctgaggtcaggagttcgagaccagcctggtgaaaccccatctctactaaaaatacaaaaattagctgggcgtggtggtgggtgcctggaatcccagctactcaagagactgaggcaggagaattgcttgaacccaggaggtggaggttgcagtgagtggaggtcgtaccactgcactccagcctgggcaacagagcgagactcccatctcaaaaaaaaaaaaaaaaaaagaaaagaaataagcatttgttacgagtgacagaacttcttttttaaggctgaataatagtattccattgtgtatttgtgtataaaaccacattttctttatccattcacacattgatggttaatcattccacatcatatccaaaaatcataacaacattttgcacctcagaagtatatacaactataatttgacaatatataataaaaattaattcaaaaaaattttttaaaaaacttaaggtttggatttttttcttactgcaggagaaacaaactttgataccaaaatcaacaatcagaagaagaaaaaactgaaaagcttaggttacctttagaatgtctaaaatgtctaaaagtttaggttacctttggagaccaggcatggtggctcactcctgtaatcccagtgctttgggaggccgaggtgggaggattgtttgagcaagaaggagtttgaggttagcctgggcaacatagtgagactctgtctctaaaaaaaagttaaaaatttatccaagcacagtggtgtgtgcctgtagtcctagccactcgggaggttcaggcagggaatcactggagcacaggaggtcaaggctgcagtgagcaatgatcacaccactgcgttccagtctgggcgacagagcaagaccctgcctctaataaagttaaaaagtaaagaatgttacttttagaaagtctacgtgtaaggcagccaacctggtaaaattcctcaggagagaggtgtaaggtgtggcatggtagacattgcatgtggctggcagcacaatgcacatagacaaggacagaaaataaggatgcaagtgggggatgcattttcttaaaattcaggcacaaagcaaaattcttccttttaaaatccttctccagaggtaatcacttttgagcagctttaagtatatgttttcacttttctgtaatattatggtttgttgggatttttttatttacaaaatgggataatatttatggagtagacatatcttcagatacagtttagctcatctcaaatgttttaagcagggacacaacatgatgaaatttctgtttcggaagagataactcttgaagatttcgggcaataggcaagactggaagccaggaggccagcagggggtgctgttgcagggcgcttggggagaagcagatggtgggtgtgaaggaaacgggattgtatgtgcgctgactggaaattctgaaaatttcttttgcaattctttgtaacccttagatttggaaacattggttcactgagtgtaaaggaaatgagctcaaatcaaaagtcaccaacaaaaacaagtaaatcccctgggacagctaatgttctggatgtaaacaattcaacactcatgtttgttggaggtcttggaggacaaatcaaggtaacattatgaaagttcttctgaacaggactgattgactgattttacctatatataaaagtcatgggccgggcgtggtggctcacgcctgtaatcccagaactttgggaggccaaggtgggcagatcacctgaggtccggagttcaagaccggcctgaccaacatggagaaactcttgtctctactaaaaatacaaaattagccgggtgtggtggcgcatgcctgtaatcccagctactcaggaggctgaggcaggagaatcacttgaaccctgggaggtggaggttgcagtgagctgagatcgcgccgttgcactccagcctgggcaacaggagcaaaactccatctcaaaaaaattaaaaaaaaaagtatatgtttagatggttgaatatatcctaagcagatgaagatgtttctgcttttgttttgctttctgacagttcctctgcagagttaggctggttttgtacagtaaagggtgatgcttcatcagtagcataaatggagaaaaagccaatggctcatcttgctgttcgggtttctttcccagtgatgaacaggaaattcagtgctccttgttaatttctgtaaagtttctttatctctagtctagctctagttagtggtcaattaatactaattagtgtttagcaaaaaagcccaccatatttattttattgtatcagttctcctctcaccaaatataattgtgttttttggacctggttcaatgttctcaagtgggagtctaggtctcaggtccagctgggccctcactaccaatcacattctctggctctctgttttctcactcgtacaacacgattttctccatcaaccctagtcactgagatgatctttaagatcctgcccagttgttactcattctaggattccacttcataactggaaggaaatccagtgattacaaactggccttttttctaatgttgctctctcaaaatttggatctgttagattgaagctcccagagagaagttttgtgcacgtggagaatgtattttgcttggtcagcttatatattggttatgtttgtttgcttgtttgcattagaaatctcctgctgtgaaggttactcattttaaaggctgcttgggagaggccttcctgaatggaaaatccataggcctatggaactatattgaaagggaaggcaagtgccgtgggtgctttggaaggtaagatgtcgtcatggtttagcacatagtatgtcattctgttaacatctgagaagtgctgaaagaatgtattaatacatgcatgtcaaggaatagagtttgtgatgtcgctggtaggtgtttagctgccacttacaaagccatgctttttcatacgtttattgtcaaaaaaaaatcctgcgacattggtataatgtagattataccaatctacattatattattatattatattgtcagatgatataatgtagattagttactgagagaagcatgggtatcatttttaaccccttaaaaagaagtgctctttttcctatgtcttgtatgctttgatcatggatcataaaccctaaaagtttcagacaatttctcaaacaaccttctgtctcagagagccacaaacaaatctttataaatcactgtacatttttattttgaaaatatctccaaggataagaattttttcacgtgtgtcagtttttacagctaagtactttccaattccgaaccaagttctataattccagaaataaaatgcattaggaaatagagaaaaatgagtatgtttctgcatatattgatataaaggcattcaatgacttaaccttaccaagtgcaacatctttccccccaacccattattttataacaaaataactgcaactccttaagtatataaaacctgttttccatcactttagtaattgagacataaattgcttttttccattagagaaatgtaacatctgatataatttctcttgtctaatgggctgctctgtccagatggatatctgcaattatccagtgacaagatcagttaaagcaactcacagcacatttagaaactcacgggtgaatttttcattttgtcattgtcaggtctgtagtttaagccttctcttttcccctcccttcgcttgtttaaaaagttaggaccaggcgggcatggtggctcatgcctgtaatcccagcactttgggaggccgaggcgggtggatcacctgaggttaggagttcgataccagcctgatcaatatggtgaaactccgtctctattaaaaatacaaaaattatctgggcatggtggcacatgcatgtagtcccagctactcaggaggctgagacaggagaattgcttgaacccgggaggcagagccaagatcatgccactgcactccagcatgggtgacagagcgagactccatctcaaaaaaaaaaaaaaaaaagttaggaccagaggtttggtgattgtagccttaagactgaaaaagaatatagggtttggagtcttgagtttctcaggcttctggcccaggtcccccaccaaaattttcttccctgactttggataataagtctcttcacctcactgaggtttggtttctttttccagaaaagaaaaatgatcatcgttcttgtcttacccacctctataaatcatagtaatgaacacacaacatgatgcgtgtgaaaatgctttataaactgaaaacactttaccagtcttcaccactggtcccctacagtgatgtggctttgctttgtagataaatgtcacaggattttttttttttttgacaataaacgtgtgaaaaagcatggctttgtatgtggaagctatgataaaaaatgctgttgcctcgtgaggtaatgacacaccctgctctggaacttcagtggaatgagcaccttaattcaggctctctgatccgccactttttccttattctgtgtttccagcaaggaactcttccagcaatttagtaattctaacatgaaaaacaccctgacccctagactcttatcccctctactgaccccagatcattaacctcactgttagaaagaaaaatggttaacagaaattaaacatttctagtatgaaaaagtccccctactttacctgtgacaatatcctctattttcatcagtcatttccagaggtattttgaaatcattgacgtcaagctacagcactgaatgaattgaatgatttccggctcttctttttctgttggaatgaggaagtcagctttttaggtggtcacatgttttgttccccttgaaatacctggcctgcctccggatttccacacaccctggacctttgggtcaaagatgctgccctcctgccaactcgagactggctttttgacggagggctggccacccagctgagtagtagaaccacgttgactcatcagctcaaccaaactagggtctgattaaatatgtttttctggggactgaacaaatccactgttatattggccaacatttccaaaaatacatgtttgtaaagaatactagtttggtgtagggtattaatacgtattgtgtactgaccataaatgtttgggaaacactgagttaaataagcatgtttcttggctgcgaggccatcggagcctttaattagcattaatatgctgacatgcatggtaaccctgtcctggggagaggctagagttgcagcatttcccaaactcacttgagcttgaaccctttctgaaaaggtacctctgggtgaggctcacgcctgtaatcccagcactttgggaggccaaggcaggtggattgaaaaagattagccaggcatggtggcgtgcgcctgtagtcccagctactccggaggctgaggtaggaggagcacttgagcccctgcacttctgcctgggtgacagagtgagatcctgtctcaaaaaaaaaaagagtgcatctggagttgcatctgcttcgtaaaacatattttgtgaagtgctgatataggcacagactggcactttacgtctgtttgtaaattgattgaaccgtcttcattttaggtaacatcccccactgcaccccttctcctgttagacaagaactttagttcaaagagttaataccctaattctagtaacaatccattttagcagacttagattataattccttgtcctttctgtgtataatttgccattattaaatcattagtgtagcccatcgatgtcctctaaatttttaaaaaatttttgactgtttactcttaaatgtgatttatattaccaagtaaatgaattgaaacttttttattcctccttgaatatattattacacttgtacatggtgtcactctgtaattatgagcagtctgttatattctcaaaggatgctacagaattaaccactgattctaacagtcctcatcaaaatcaatatggaaagaccctttatttaattaacaggcacaatccttgtattatttacgagtggacattgtgagagagtgctggctacgtggctggcctttgacacgagtaagtcacctgcgttccaggccctctgctaggtactggccatgtccacatacatcacacgtttatgtcctcagacatctcatggcgtaggggaaaatgcctgtatagaaagcagaaaatgcatgggctgtggcaaggggccagagttggagaagcagcatcccaagcccgggccagggttatctcacgccctcgcatgacggcagcagggcatgctagtaggtcagctccggattatccacatctcatgagggagccctcggagaatcagggaggtctggtgattcttccagactcacggggctgagcgctggggagggcggacgctctcctaattccaggctcccacttgaacctgcgggtgatggtggcatttccaaggctggaacagagctgtccacaaagtgctgtgatgaactgagctttcatttgtcctgggcccttaccaaggcagggacccacttggggaacaggcacctgggccgactgttgaggtacatgtgcctctggtcatagtctggaaactggcaggggctctgggagaagttcagggaagtgactgacatggggacaagccttcggtcatgttcagtcatcatttcatttgaggtccccctcttcgtggccacctcactccagcaggccctgttgagggagagaacccagtagcagagcccccgcgttcttgagagaggagggctcacaggctctgggaagggagaaagcccccatgtttttgggagaggagggctcacgggctctggagagggaagggccatgcactgaggaccaagacaaatttctggagttttgtttgaaacctggctttgtgatttcttggggtgtgtccttgaacaaggtactttaatctttgaggctcagcttttcataggcagaaatgaggaccggcccatcgaggacctccgaacactgcagaataatgagagaaaacatctgttgtatgccaggcactgttctaagaactgcctggggcagccctcccagagaggttttatggtcatccctgttttatagctgaaggaaggggcacacagagaggttaggtgagttttccaagttcacacagctagtatgttggggacctgggatttgaaccctggtagtctagctctagagtctctatcctccggcacatgcactgtggttggccaagaggtagaacaatggaacatatggctaggaagccacaggcttaagaattaaagaattaaaccatagttgaagaatttatctagagtgcatttcttttaagttataattcctcaaagagaccacatgatggaaatttttgaaaaagcaagagtgcaggtagttatacatttgaaacctcaggtttcacaaagcactattttttgttttgttttcttttatcatccatggaaacgattttactgtttggttagactgccttgcttggaaatgtggcactgagtttggttcttacacctctaactgggaacagttcaaattcttacccaaaaactatcctcatccaagtttcactctcaagccttatgatattccagaaaattatttttggaacataattatggtctgttccagatgaatggctttgcgattgaatagtgagtcaagtcagccttttgctctgttgggggagaagaccagaaaacacactcacctgaaaatgccctgggccgtattatatcccttttgtaacctacgtactcatctctaagtatgatatgggtctttaagctcatcctgcagatttttgaggatgtcagtgatgattgttttgtgaagtgatgcttctggtatatgggcacatacttgctttccatcataactccagtttccctaaggtattagttaaaacctcatcagcaaagtgaaaatgtcaatataaaaattattctgaaggcaccagagttaaaagaggacagttatattaaaggagattagaacaaataaatccagttgataaactgaaatatttatagcagttatcctcctgtaaagaaatgtatttttaccacaatgaatactgcctgcattaacattattttctttataaagcagctgggcatttgtcttgcatcttcacatggcaagcatatttttaaatattatcatctacacttgttatgaaagtatggaactaatagctctacagtgatctttgtgaaggagaactcagtaagtgtgttcttggttctttctaccctcctgagaatggattctatttcatctcttctgctttgcagctcccagaatgaagacccttccttccattttgacgggagtgggtactctgtcgtggagaagtcacttccggctaccgtgacccagataatcatgctttttaataccttttcacctaatggacttcttctctacctgggttcatacggcacagtaagagtgtttatggggccctaggccctactgtatacgcacatttagattgctatgtggttgtttatgtttaatgaggatttactaattaaatatgtacatatgtataccatacaatttttatgagcatatactagtattaatatatgtgtgtgctaaacaatttcctcattttaaattatttattatcattgtagaacctttagaaaaatatagaagaacaccaagtagaaactagccttctagtctttatagatatcaattcaacatttgttattaaatttcgagctcaaataatatgtcttgttctgggttcactgtgaccaccgtgacattgtttgaattccatccatgggaatttcatgttcttgtttgcatctcatgggctggtgatttctgtctttcagtcttttggttttattttttagaacgggccccttgtcagtctcaatgaaaaagatacgaggagattccatttctcttactgaattgtggattttggtaacaacagatgacatttcatttatattagtgtagtgttctagaaagccttcgtgggcatttttggtttcgtagccgatagacctctggctgtggggccagatccagttttctcagtttgactttagaaggtttcagccatccctgacttgaagggaaagggaaacctgggataaagctataacctggggaactgtgttctcttttttacagaaagactttttatccatcgagctgtttcgtggcagagtgaaggttatgactgacctgggttcaggacccattacccttttgacagacagacgttataacaatggaacctggtacaaaattgccttccagcgaaaccggaagcaaggtagggacacagatggactcaccagatgtcggtcaccctcataagaatagaaatcttttcaaaatcagcattcttttttccacagtagtttcctgggtattgaatgatagtctacttgaaagccagtgttgtctttggaatactaaccaacaggattcacattttgctggaggagtgttatacttgtatttgcctgtgatttccaagtgtgttatttaacagtaaatgctggattggaatcaagaatcaaatccattctgttttcttccacatgcatactgctcttatttagcaatgtgtattgactttgatagagaggattttcacttgtccttcaatagccaagaacattagctgatcaaattcgcagaatctaaaagaatatgcatttgtaaatgagctttgttgccagaagtttgcattttaccttaacatggaaagagattttccttttcttatctcttgcctgtgctctccttttaggagtgctagcagttatcgatgcctataacaccagtaataaagaaaccaagcagggcgagactccgggagcatcttctgacctcaaccgcctagacaaggacccaatttatgtgggtggattaccaaggtcaagagttgtaaggtatattaaactgcagaattttcatgtccctgatttccaactgtattagcttgctagggctgagaatggactgtatcacaaaccaggtggcttaaacaacaataatttattctttcccagttctagaggctgcaagtccaaaagcaaggtgttggcagggcttgcttccttttgagggctgtgagagagaatctgttccatgctcctagcttctggtcgcctcagggattccttggcctgggtcctgtgtccacatttcccctttttataaggacaactgtcatgttgcttaaggacttcccctaatgacctcatcctaactcgattacctctgcaaagaccttttccaaatgaaggccacattcacacataaggaggatcaagactaccacatcttttgggaggacacggttcaacctgtaacatctgcttctatttattcaaagtactctatgccatgtgatttgagaagtaaagcaggccttctgcagaaaaattagtgattttatatgtattgcctttagaacatctaaatcctgttaccgtgcaatatttggagaccctacttgctgtcatacttcatctccctctctagacattttagagaagtagatctcctttaaggcaaaaggaaaaaaaaaaaaaaagaaatcatgctttctgcagacttttctggattctcctttgtgtggttagactgaataatgtatgtgcaagttgaaagaccagcatcaagaagtggaatgaaatggcacaggacacacaatggaatccttgtgtaagactgattcatgttgagctttgtgactttaatgatttacagaaactttgtgtggctggttcattgtcctcagttttgtaattttggttgtaattaaactctaaggttctttcacaccattcaaaaaagacatttatgaaagtccaatagtcaaggtaagacagcttgcagggagcggggtcattaaatgtccaaactgggccattcagcatagtggttagcaaatgtccatttgtagcagcgctctatctttaggtcaggttctttcatagaatcctcttatatggcacagagctgcagccattcagttgccatgatgagcagccttttgtagagagaaccacttctccactgtgccctttctctttgccaggtatcttagaaagtcccaaggaacacagtttgcaaccatagccgcctccggatcttagaatcgaatccatttaaacctcaggggagttggtcacttgctaagtcttacctccctgccaagacggagccaggactagaagctgtctccagatcccatcccagattcattccctgtcatgctgggaccaggactggggtgttcctgtagcctcggctatgtcctagtacatctggactttgcccagacggcccagtgtagacaacgcaggaaaggacagaagcccatatcacagatgttctcagtagaagggacttaggtgtcatcaaagccagcctcctcgtttacatggaaagaaattgagatctagaaaggttgaaatttgtccaaaatcatatagttgcttaatggtccatagctcattgttcaagatgagaaaaaaaaaatgaggtgtgactgtaacaggaaaccatgttattgcaaagctctcctgtgaagagctggtacagaagagtacagctgggagatgttcagtggtctccatattttggaaattagagctggactacattgtagcctgacctcagccaggagtgtggagacttctggtaagaaaaatatgatattgacttgaacattgagaagtagagtttcggataatcccagagttcaccaaatacagttacttcctttaggacaaagttcatggatatgcaacgtaaacaacagacaatgacttccttttttagcagtcagatcctgggaaatagcattacctgcacttgtccccatgggaagcaaacattctactctacatggagactggattataatctatgtgctgcaatgcactgtgcactgtctttcttataattggcctgtgttttctgtaggtagccatccaagtagccaaactcactaagtttgatccctttctctagtcctaaggagagtaagagagtatttgtttgacctgaagttctctctatcaatattgctcttagagggaggccaagacatttctgcagagtaacacatggaaacaggtattccagaagtatagggtttacccccctccccggcttttcttgctttggggggcaggatcttgctctgtcacccaggctggagtgcagtggaacaatcatggctcaatgcagcctcaaactcctgggctcaagcaatcctcctgcctcagtctctgggactacaagtgcatgctaccatccctggctaattttttattttttgtagagacagggtctcactatgttgccctggcttgtctcaaactcgtgggcttaggtaatccttctacctcagccttccaaagtgctgggattacaggcataagccactgtgccttgcccagtggctttgtattccttctttcaaaaatggaatttaaaaacccaaattttgtggttgttctcatgcccttccctacaggagaggtgtcaccaccaaaagctttgtgggctgcatcaagaacctggaaatatccagatcaacctttgacttactcagaaattcctatggagtgagaaaaggctgtttactggaggtaggaaacattgttattaatgttcaaatgagtttccataagtgtccattgatttatcaacatcataacacaacaaaccagtggggatagaaaagagatgatggggaaatcagcagtgtcctccccatggaaggtttggccacagctaggaactcaccatgctgtttcatctcctctgtgtccagcccatccggagtgttagcttcttgaaaggcggctacattgaattgccacccaaatctttgtcaccagaatcagaatggctggtaacatttgccaccacgaacagcagtggcatcatcctggctgccctcggcggggaggtggagaagcggggtgatcgtgaggaagcacacgtggtgagtagggccggtgctcctgagccccaagctcaggaaatgacttcgggaaacaatgaatggaaaatgactgactcataaacatttattgtcgctgtgttcctggttgtttatggatgtgcattttcaataagtaaaagttattgttgctgaatgtcatcccattatgaatcaatgatttctcatattgcataatccatcttcattgtctggtaactgaggaaaaagttatttgctgtctacctctaattttttaaaaactcattcagatagcatatacggagttttcttccccatgttgtggtcatttctcttcattccaaggccaacagcagtccttaaatcctgttgaggtcttcagtctactgctggatgaagcaagactttctttatctattataggattgaaaggagcagcaagggaaatgtgggctgtgataagcacagtaaactaacagagagaggagagaaatgatgaccattttccttatttatgttccttttcaagagcgtaggtgatatttccccatcctctgctcaaatttgtgtctatcacataatttgaagagactttacagaatgttagcacactgtcttaatcaagttgagtccatgcagccaaaatctatagaatgccaccttgtactctgcagggtactttacagacattgctgtgtaattatcacaaccatgctgcaaggggaatgctgcttcctaccttttgctgaggaagaaatgtgctgagagagcctggtaaacctgaccaaggtcacaccactggtatgagtcacagtcaggactggaacacaagtttgcagaacccaaacatgtcacaacatacttggggaagggctgacagtgactacgactggttaatgagttccactgaccttttttttttttttttttttagttgaactgaaattcatataacctaaaatcgaccatttcatagtgaacaattcagcagcatttagtgcattcacaatgttacgaggccaccttttccatctagttgcaaacattttcatcactcaaaagcctatgccattaattagtcactcctcattctcctctctccccacccctggcaaccaccaatttgctttccggctgtatagttggatttactattctggatattttgtacaaatggaatcatatgatgatgtcttgcatctttcacttagcatgtctttgaagttcatccccattggagcatggatcagtacttcattcctttttatggctgagtaatattccactgtatatacataccacagtttgttcatcagttacttcatggatgaactttggggcatttctgccttttagctattatgaataaatgctgctatgaacatatgtggataagtatttgtttgagtccctgtcttcagttcttctgggtgtatacttaggagtggaatcactggttatatgataattctatgtttaactttttgaggaactgccaaacttcttctccattagtcttagtaaggttactttcaaatcaaagtgtgcttactaagtcagcaaaaaggaatgatattagccattgctagcaagggtattgtgagatactcacattccaatccttctagtgtataaactacctcttttcaatgtgtcaaaaaaaattaaaagctttaaacattttcacatccttcaaatgtttaattctacttttcataatgttggaaacaacatcacaggcaaaacaattaaatattcatatgtatgataataaaaagttggaaactactttaaatttcattgataaaaagacaaattacaatatatctacttattggtatctaatgtagcaataaacaataaatatgaggcaatgcagaatggaaatgtttgaagtcttcagcaataatagcataatgcagaatataaattatatgaacagagattagaaagtaacatacaaaatttaacattgtgacagctgaagagattcttaaggaattgctctactcatttgatgttaatcttctcacattatcttcataagatgaaagttttctaaatcatatagtaatgtgttttgtctgggaaattctctatgcaacctccccagcccttcttttccatcatgctgatcggaggcaacattgaggtacatgtcaatcctggggatgggacaggcctgagaaaagctctcctgcacgctcccacgggtacctgcggtgatggacaagcgcattccatctccttggtcaggaatcggaggtacttgtacgcggccaggcagtgtgtaatgaaggtgtggtgagctcagagggaatgtgggaggaaccttgcggtggtgccctgggcggctagataactggggtcatcggcatccaaataattctagaaccttgctaggattctttcctgggaaccagtttcatctgctttgtaataagatacttgtagaatttttataattaaacaactttagctctgccctttactggggcccagcataaattgtctttacattggattgattctgtggcaaatagtactacactattagtaaataatgttatatcaatagtaaatagcattatatcaacattcctgtatatttccctccaaaatgtagactgaatgctttaaaagcacactgggcattttcatcataggtaaagaggttaaaaaaaaaagaaaaagaaaatctctccaaaaggcaatctcattcaatggatatttaataacattccattcgtttctgaaaaatcttcagttgtgagttttaattttcaagattcacctttttggtcacagacagtgtcttgttaaaatgaacctttagggaacttttattattcagtgagaacttgtgggaattatggactaaaatggaattattatttcattacgtttaaagcttttcatttattttctccattggtcttttagaatgatcactgtccaattggatgagaacaatcctgtggaaatgaagttgggcgcgttagtagaaagcaggacgataaatgtgtccaatctgtatgtcgggggaattccagagggagaggggacgtcgctgctcacaatgagaagatcgttccatggctgtatcaaaaacctgatcttcaatttggagtaagtgtacctgctctctgcatgttcttgcactttctgacctttcatggtgagtgctaacactaatctgaaatctcattgtactgtttgagattgaaaactttgcaaattcccaaataatgagtgaaccccattgttctatcatgtaagtctccccagatggattttattggattagaatgttagacagatctggtcatcatactttaaaaaccatcgctgaacattagctctctgtgactgtccataaaaagccgggattttaatatatttttgacatgcatttgaaggaacatagggattttgtgatgtaagtctcttgctgtcctgagagcattgctttgaaggagctgtttactacggggctactagcagcttcaggttatcaatggcttccccaaaaacaattactgtataattaagaaccggaagcctttgggggtctaaggtgggcagatcatgaggtcaggagtttgagaccagcctagccaacatagtgaaaccccgtctctactaaaaatacaaaaaattagccgggcgtggtggtgggcacctgtaatcccagctactccggaggctgaggcaggagaatcacttgaacccgggaggtggagctgcagtgagctgagattgcaccattgcactccagcctgggcgacagagtgatactctgtctcaaaaaaaaaaaaaaaaaaaaaaaagaactggaagcctccattccctgtgtggagctcatgaggaggaaaagaactgacatgtgcccatgagcagttcattcctccttgctcaccctctgcctctggacagggtgctgatgggacacaagctgtgctctgctctgtgggaccagcatctgcccaggagaacctggaagtgccctgggcatcaggaaattgaagctccctcctggctgggtcactgacttgcctagtgaccttgaacaaagacttggatctttcatggtcacagtgtccttatctgtgaaattacctcttaggagtccctgaaatttgcaagaataaaacatagcattgggtttcaatacaatcataatgtcagagctctggtttagatttttgtacaggtttatgtttattccccctgttgtctgttcattcattcattcattcattaatgaggcatcctcatgctcctgaaagtcatgggtttgtggactcggtagagcagaaacgtttctgtggagttcccagctgtgcctgggaaagtgccagggggacgtgtgcaggcacaggaaacagcacaggagctgcagagtgaaagtgcatgtgacaagcgtagcccacaacctcctggcaaggggaagcacgtaaacaagaaatcagtgtttcatggaggtcactgtgcagcgcttgggaactacagacaaaaacgtgtccctgaggcagcccagtcaaggctgcaggaggaggcgatggcatcagagctgacctggggggtgctcaggaatggccagggtctgacatggggatacgctaggctgggtgccattgcaagcagaagcatcagataagaaatattaaggtagcatgtctggactctgagtcacagtgaaggattggcactttggttactctaagagaaatatatacatggtttttaattgattttcattgtacagttatcagatgacttgggttcatggactggtttgtgatatcctaattttgaaaacactctcttgtttctacctagacttttggatttcaacagtgcagttggccatgagcaagtcgacctggacacctgctggctgtcagaaaggcctaagctggctcccgatgcagaggacagcaagctcttgccagagccccgggcttttccagtaggagcggcttcctttactatcagtcaggtccagtcagcgaaggagggcctaggacagagggagttaaaatggggccttgctgtaaaggtgcctgcgaaagctggagctggagctggagccgtgctaaaaatcagagtggggacagggtgggaaagggtgcctcaagcaactcagatgacacggcccaatccatagattgtaggccccaacacccaggccgcgcattgggctgacgtataatatgcttttggcagagcttctataaggactcattatcaatttacatttagccaggaaagcatgaaaataagtacttcatgtaaagccattgtgcacatatttgttgctttaaaaaaaaaaaaagattcaattcattaggaaaagccagttctggccaaatattttgaatggcagccattgttatttttcattttctcccccttttgctttctctgtttccctggtttaaagtgtgcactctaataatttagaagatggcagaagcattcaagagcaggaccttctgagcagggcgaggctttgagttcagggcagttttcatggtagcatctgcctgtgctgaagcagaaaacagcatctgggacccctgtgacttgggcactctcagggcagcccgcagatggttgcatggggttcaggggcccttcccgcctggctcctcttgtttgcatcctgccctgtcagtgtggacctaggttcacactctgaggccctgcaaaacatgtcacctgtgggcacctccagttttccagtgcctggtccgcagctcatctcggcagctgcatccttagggccattcccaaaacctcaggtcacggcgggggcctagggggacagcaaggcctttgccccttaagcctgatgaaaatttgtaggaaagacttcagtgtccttatgaatttcagtgaagccgagtgggattaaggtgaaagacagaagctctaagtgctttcttcagggagataaagcgctggcgagtgcatcatttaaaccgaagatggagtgagcgccaacaggcactggtggttgttgctgttctaatgggattgctttgtagatggctcttcatggcggaacacgcgtgtgtcagtggggttcgggctgcgggtggcggctgagtgtccctgtgtgtctcttacaggaacagtgtgtggtggatgcagctctggagtacgttcccggcgctcaccagtttggtctcacccaaaacagccatttcatcttgccttttaatcagtcagctgtcagaaagaagtaggtatcattctaacatccttatgcagcgtctcattgctagatgtatgggggtgttctgcagccacagagtcttttccaaaagaacctgcttttattttacgatgaagtgcttgatttgcaaccaaatggcaaaaagaaggaattcagtgttggtgcaaatcacaacgctttcatggtggttcactggggagtctgtggtttctgccttttcccttctggagagtggctggcttcccctttctgtgtgcatgtaaggaagcgtgtgggcgtctaaattaagtctcccagatctattattgtttggactttcaaccccattccactttaagcattccctagtctgatgtctttgtctacccaaactcttacactgtggtggccaaaatcccgagtgccacacccacccctctctgcaccttctggccctcatacctgcctgtccctgggacccttctgccaagggaagatctcaaggcctggagcttggggctcccggactccatgttgctcctctctcctcctgaggtcctccagctcacctgccaggcttgcctgcagtctctgccatgccctgcccgtcttgttgtcattggctgtgagtgccaccctgtcatacccccttagacctgggctcctgtctgtcttctgcagctcctgccatcactctctgtgaattcaacagctgcctaacacctgacctttctgtgctcaaactgtgatctgtggaaggtctttccctgctccctcctcagccagcctcttccatggccatacccttgacttcttcacaggtatccatccctcccacagtctcgactttaaaagcctcctattagcaaacccctttcttcttgtctccactctgtgcctccccactcctgcagtttctcagctgcatggagacctctaagccgctagccctaatgccctcccaccaccatctcccctcttctctagccccaaatcacaattcatcccccagataggttccaggccagtgttacagatgtcctctgcaaaatcccctaaccctttctctctcccactcctgcgagcccaggtaaaagccaacattccgccttctgtgtgccagaacccacacgggagaccaaggccgaggagatggatgtctccttcctagctggtttgagctgggtatcatagccgtcaatctcagatggagcctccaaacgacatggggagccagtgcattgctctaatatgttcatggtttttattctccatgactacttcctcatagctgctcttagctcagagccctgtgcaccgcagtctctcttcccaccccagctgatgacttgcctcgttgagaagaaagagctccttcatccgtccaccaccaaaaagaccagcccctgcttttgttcctgaccctctatctcttctgctaccacagatgaagggtacttgttcctagcaaagcccacccgacagccccagcttgtcctctggattctcgatcccatctccccttcctaggacatgcacagcagccactcctcacagaccagcacacagatgccgctgtcaccccatcgtcagcagtgacagcaagagcagcaaactattgtgctggaggttgacacaaagatttttacacagatgccctaatttactcctcataattctcctatgaggaaggtattgttattatctccatttaacagataaggagattgaggtatagggagcctgaggcatctgctcaaagtcacacagctggtaaatggtagagctgggattcgaacccaggccttctggctccagagtctgtgcctgtagagtagtttccccttctcctcgggggatacgttccaggacccccagtggttgcctgaaacctcggctagtacctaaacgtcatatacactgtgttttcctatgcatgcatatctatgataaagttgaatttataaattaggcacaggaagagattaacaataataataaaatagaagaattataacaatatgccagcatcactcctcttgtgcctcgagggcattattgagtaaaatcagggtgacctgaacacaagccctgctgtactgccacagtccatctgcaaacctagacagctataaagtgaccaatgggctcatggctcctatggcgtggatccactggacacagtcagacatggctcccatggtgtggatcctctggacacagtcagacatggctcccatggcgtggatccactggacacagtcagacatggctcccatggcgtggatccgctggacacgggcagacatggctcccatggcgtggatccgctggacacgggcagacatggctcccatggcgtggatccgctggacacgggcagacatggctcccatggcgtggatccgctggacacgggcagacatggctcccatggcgtggatccgctggacacgggcagacatggctcccatggcgtggatccgctggacacgggcagacatggctcccatggcgtggatccgctggacacgggcagacatggctcccatggcgtggatccgctggacacgggcagacatggctcccatggcgtggatccgctggacacgggcagacatggctcccatggcgtggatccgctggacacgggcagacatggctcccatggtgtggatccgctggacacgggcagacatggctcccatggcgtggatccgctggacacagacaggattcactttctgggcaggatggagtgggatggcatgagatctcatcacgctactcagagtgatgcccaatttaaaacttatgtattgtttatttccagaacttcccatttagtattttcagacctcggttgactgcaggtaactgaaacctcaaaaagtgaaaccttggaaggcaaaaccgcaaataagaagggactgctgtaacctctgtgctccactccctctctcactttgacttctaaagcagaccccccacaggagacgtcacattcccccgcgcacacatgcacagtacctggctctgtttcccagcaaggctcttgaaagagctgccctttcctcagggactgtttcctcatttaaccatccggtcagcctcccgcacacccccagctgcccttgagagagttactcgagacccctgtgcagctacatggtgcggagccccctgcactgggctctcagcagcccctggacttcttggctgtcacagatgcacactctcctagttccctgctctctctcggcccgccttcctcagtctcccagctgagagtgctgggcccttccacacgctctcccaggatggccttctatgttcccatcaccttaaaatgccacctagatatggcagaacctacctgtgtagctctggcctccacttagaactcaggatttgtggacccaccagccactcgagatctgcatgtggactgggacaggttcctcagccactcaacatctctatgtggcctggaacagtctcctgggcctcatcaccccgaatggaattcgcaggcttccctcagtcctgctctcctgctctttgccgttgccgcgggcacaatcaccattcacctggttgcccaaggcccaagcctaggggctatttttcatttcactttttctcactctccaaatccagtccattggcaaatcctcttgcttcttcctccagaacgttacctgaatctgttctgagtccccaccgccaccctggtctaagccacccgactcctccctgttggctgtcgtaacagctgcctgatgggacccgcttcacccctgaccccctgacctgttcttcagtttagacagaggatcttttaaaggaattctcggccactccccctttcaaagccctcctgtgacttcccactgtgccgaaaatccaaacaccctcaaagcccctcctcccctatgatggagccacatctgccctcgtcctgtccctgggtgctccagtgacaccgtggtccctctgactgggcccacccaggcgcagccttcctccacacctgcagtaactctggttcccctgcggcctcaggtgggcttcctgctgtcccctgccatcaagccctcactttgcaggggcttgcccctttctgtcattcagacctcagctgaaatatcagctttgcagagttacccgtgttgaatgcttaaggtagccactggttggcctctacaggacccactttactgtctgatgtgtttctgtattagtttcatgagcaaagggatcttcctctttgttcacagctttatcctcatcctgaaacagttcccggcagacagaggtaggcagtaataactcattatatgaatggatgtgtaaatggatgaaggaatgaatacccctctctcctgagatgttcaatgtaaacgctgaaacaattgttaggtcctcttttgaggttttaaaaatgaaaagtaaaagtttcctttctcaatgctgagcacttgttttccccaggctctcggttgagctaagcatccgcacgttcgcctccagcggcctgatttactacatggctcatcagaaccaagcagactacgctgtgctccagctccacgggggccgcctccacttcatgtttgacctcggcaaaggcagaacaaaggtctctcaccctgcactgctcagtgatggcaagtggcacatggtacgatctcaagaggcttgtggtggctgcttctgagttctgttccatctatcactcaggttcactccatttctcaaaggcacattatccccattaatctctatctcgccgtgtgtgtctggtgtctcccccagagactacaagtcttgaaggcagggatcttttctgcttctgaaatatccccagggccttgcttagtacttgacatgaaatagacattcagcaaacattggcgggatgaacaaaaggtactagacatgttcttgacttggcaaggagtatgtaaagcccagcctcccctcatggcatttgctttctgataactggaactctggagcactttctggtgtgcagcacgctttacctgtgcctgtaatcggccagctgggttgttcttgtccactgcccagaaaagcaaatgcactaagaatggcaggttttgcagcaaagaaagagtttaattattgccgaggcaacttgccaggagataattctcaaagccgcctccccaagaattcaaggactagggttaaaacctcgtgtaggccgggcgcggtggctcacgcctgtaatcccagcactttgggaggccgaggcaggcggatcacgaggtcaggagatcgagaccatcctggctaacacagtgaaaccccgtctctactaaaaatacaaaaaattagccgggcgtggtagcgggcgcctgtagtcccagctactcgggaggctgaggcaggagaatggcgtgaacccgggaggcggagcttgcagtgagccgagatcgcaccactgcactccagcctgggcgacagagcgagactccgtctcaaaaaaaaaaaaaaaaaaaaaaaaacctcgtgtaaacaaggatagtttggcagccgggggataaggaatggcaaatgctgattgattggattggggaagaaatcatagggggtcgaagttgtcttcttgtgctgagccagttcctgggtaggggttactgctctgggtggtgccagttggttcatactgaatgcaaagtctgaaaaatatctcaaatgccagtcctaggttttacaatagcaatattatctatatggggcaattggagaaggtataacacttacgactattggctacgtgattcctaagcaataagtagtttaaaagggcaaattataaacaatgactggttagagtttatgcctacatcttagcaggagaaacaatggctggttagagtttatgcctgtatcttagcagaattcaggcccctatcacaattccaaccttgtggcatttccttaattttacaaaggcgattttggtccctgagcaaggagggagttaattttggggagggactgttaaccatctttgttttaaactgtcaactaaattcctcccatttcgggaagggactgttatcatctttgatttaaagttaaactatccactaaattcctcccatttccagaagggactgttatcatctttgttttaaactatcaactaaattcctcccatagctaggttgaattagcaaagacagcttatgaggttagaagcaagatagagtcagttatgtcagattcctcttgctgtcatttttctatgtcagatttctttcactgttacagtttttgcaaaggcagtttcatacctgcctcctttcttctgccaggctcatccacttttcgtcaccaactgtctaaaaatttgaaccatcctttagcattgcattcaggttgttatagctcttagaaacagatgttgcatctgttaaagtttatacatgtgttaaaagttttttcagattcctcaaaaattatgcatgttttcactttgctgcaggtcaagacagactatgttaaaagaaaaggcttcataactgtcgacggccgagagtcccccatggtgactgtggtgggagatggaaccatgctggatgtggagggtttgttctacctaggaggcctgccctcccagtaccaggccaggaaaattggaaatgtaagcagcattttccatactgacattttaccttcattgtggttgtgcttattttgtagaagagcatacctcacggcatctttatgtttaaattaccttgtttgaacctggggcttgtaaagaggtttactttgcaggcatgtccacagatcgtgtgccagggccaccccttagaacccgatcagtctttccagcctgttagttaatgaacatctccctttccgcagccacgtggccacagcacaattcagggaagcccagcaaatgcatattcgcacattagtaaactcagcattttttgatttccacaatatttcactaaaataatagaaaacacttccactgcattattagcaaagatactcaaatggtagctctaacttagacattcatgtgaagtattgtggcaattaaagttttaaaacaaaaagattacattttaatgtgttttgctgagaccagtctgatgaagtggaaggaaaatgtgtccaagcccttcccgttagaatcaccactgtctactcttgcatgtcatttggcttagatcacccacagcatccctgcctgcattggggatgtgacggttaacagcaaacagctggacaaggacagcccggtgtctgccttcacggtgaacaggtgctacgcagtggcccaggaaggaacgtactttgacggaagcggatatgcagctcttggtatgtgttagcaacactctcgaaggcagtccccggatgagtctgtactctaaagcgatgtggatccaagagtataagacaggacccactggacaaggctgcaggaaaaccacattgagtttagtattccagttgattcctaatttcttggcgtaaaaagccttctcaggtcttgtgctatctggatggcctgacaaagtctcccccaaggagtggtgtgactcctgacagaggccagacatagggtgctagtttcatctatagtttccccaggttctgtaatgcacacttactgtccaagttaagaaagggctttgaattaaaaatcagcagcataaaatgtctagaccagctggcgccagggaggctgtgcagaagtttgggtggggaagagggggaagccagcagaacatctctcgttcactctgtgcttcctttctgctgttcctggggctcaggctccagccctgctgggcagccccctccgtggcctcagctccccttgcaccccccagctctgggcataccatcttctctccttttcccttcagccctgggcatgggaacaactgtctgctgttgtcaatagccccagtgtggctccttggcttttttatcacctgaattaaaaaagcattccattcaatccccacctttaacaaacttagtatggactctgatacactcagtaaatgatgattcccccaagcacacagatactaggaaaataaagtggactattctcagatgatgataaagggattccagggatcaaatcccaacagctcacgggacagactgccgcagggaggacgtgtccacagggtgaggcagggccacgtgcttctgtggccacagatgaaggaggtgcctggccctgctctgacctggctgactgcatgcgtcttctttaaaagctccacgtcatctcccagatgtggaagccgaggctcagagggcaggagtgacctgctggtggggatgcagctggatccaaaggaggagctagagccaggtcccccaacccctagccaagaggccaaatgctcaacctgggcctggcagcgctcaccctgacttgggtcctccttgtgtgttacagtcaaagagggctacaaagtccagtcagatgtgaacatcacactggagtttcgaacctcctcgcagaatggcgtcctcctggggatcagcactgccaaagtggatgccattggactagagcttgtggacggcaaggtgggtgcttcctctccatgagggtcttcctccccccagtgtcagagacagagcaattgagaaacagcagattcaaattcacaactatctattttcatggagtcaaacaatggtcccattactattttaaaaacagatattgctacacaaaaacctttttggtttattttttaaaagcttttcaaaaataactttttatatgtttgaaagtaagctttcagcaaaattacaactataagacaaagaactttttttcctgaaccgtctgagaataagctgctgacctgatgccctatcccttctaataattttttttaactttttgtttggaaattattacagattcataggaagttgcaatgaaatgtacagggagggccccatgcaccattcacccagacccaggtttcccagtggtagcattatgcattttttttctttttgagacggagtttcgctcttgttgcccaagctagagtgcaatggtgcaatcacagctcactgcaacctctgcctcccaggtccaagtgattcttctgcctcagcctcctgagtagctgggattacaggcgtgcaccaccacacccggctaatttttgtattttttagtagagaccaggtttcaccatgttggtcaggctgttctcgaactcctgacctcgtgatccgcccgcctcgcctcccaaagtgctgggattacaaacattatgcatttttctagcacaatcaagatacttaattgtatcaatactacaaggctcccccttaataccccatcatggccacacccaactcctgtacccctaatcctaggcaaccactaatctgttcgctgtccctctaatttctgttttgccagtgttatataaatgaagtaacgcagtaggtatccttatgagatcagcttttcacactcagcctgatcttgggaaggtcatctgggtggttgtgcatatcaacagtccgttcccttttgtggtggcatattactctgtgggatagacgtaccacgctataatttttttttcatgtagaacgtgttatttttttctgtgactgttctgcccttgcttttcagcctctcatgtccctctcctgctggcaacaaaatgaactcaacaatttgcagtactagtcctttagtctcctgcttgaaaaccgcctccttcacagtttctcccagttctcactttccttcctctcccctttggggctgtctgggcgcaggcaggatgcggggaagggagtctcgatggcccttttcctttctgtgggctctctagtggacagcagctgagccatagccatatcgtggtcttcagggcagcctcttacagtgagtggtctggggtctcagtgttgcccctgcatgggggctgctcctggagagtttggccagcgtccctttcagctcaggcttctcatcctggttgtcatgagtagtgccacctcttcatcttcccacttccccgtggggtcatgtgcaaacttggggatttctgccaagccacacagaggccgtggggaatcagggatggtgtctctctggtcctctctctacctaactacattttaccagcatttctgcagcactgtggtcaatgtttgttgttgtgggagtaagacgcctgaattttccaacactagtgcctcttggaaggcaaggaacaagtctccatgttctagattccccaggacttaccggttgtttctagtatttccctacttactccccgctgggttttgacccctaggatatcctagagtgggggtggggaggatctgaaaggtcatgtctgaccttttgcccttcacctcttttccgattcatgacaaaacagaactaacttgatgtcattttactgcctctctacactgacttacagccaactttttccctcatctatactttaaaaacttctgtatctatgtgcatgtttttatgtgacatctaaaaaatgttaccagggccagatatggtggctaacacctgtaatcccaaaactttgggaggctgaggcaggaggattgcttgagcccaggagtttgagaccagccagggcaacatagcaacaccccatctctatttttgaaaaatattttatttagataaataaaaaattaggaatgcaatcagaagtgtaattgctgcaaacaatgtaattttctgttgtattatacattttacttcttattggattattatttatagttcttttttaacatttttagttgttacctaagggtttatgacatatccttaattgtcacagtccatctagaaataatattgagcagtttcatatatagcataacaatcttcaaaaagtacatttgaaattctttcctcctgtcttagtctgcttggggtgccagaacaaagtaccacagactgtgtggcttaaacaatggaaatttattttcttgccactctagagactagaagtccgagatcaatgtgttagtaaggttcattattctgaggcctgtctctttgacttacagatgcctcgttctccctgtgttctcacatggtcttccctctgtgcatgtctgtgtcctaatctcttcttataaagacacagtcagattggatgagggccaccctagtcactcatctttacttaattacctctttaaaagctccatcttcaaatacagtcacattctgaggtgctgggggttaggacttcagcatatgaattttggagggcggtcctcagcccataacacctcctatcctttgcaaagctgagatctctttacttgctgtgggagagcatctacagttcatcagaagagagttagtaaatattcgctcataggtgctatcaataggtatgaccgggccaagtgcggtggctcacacctgtaatcccggcactttgggaggccgaggtgggcaaatcacctgaggtcaggaattcaagaccagcctggccaacatggtgaaaccctgtctctactaaaaatacaaaaattagctgggcatggtggtggatgcctgtaatcccagctatgcgggaggctgaggcaaaagaatcacttgaacccaggaggtggagtttgcagtaagccaagaccgagccactgcactgcagcctggacaacaggagcgaaactccatctcgaagaaaaaaaataaaagtatgaccagcacctccagtaaggctattagctcctaaaatgtcctaaaattgaggccctcatttaaggatgcagtgtgctcagacttgtggtcatgaaggtggccatttgtgctttctggaatttggggaatagtataacatctgaatctttttttttttttttttgagatggagtttcgctcttgttgcccaggctggagtgcaatggtacaatcttggctcaccgcaacctctgcctcccaggtttaagcgattttcctgcctcagcctcctgagttgctgggattacaggcatgcgccaccacgcctagttaatttttttgtgtttttagtagagacagggtttctccatgttgctcaggctggtctcgaattcctgacctcaggtgatccgcccgcctcggcctcctaaaatgccaggattacaggtgtgagccaccatgcccagccatctgaatcctttaaaaggttatttttcaaaactattttctgtttctcctggttagctctccttttaaacataatgctgcaattttatccactccaagagcttatacaaatggactgtgttccttaaatacacaaaaactcaccaagatatttgcttttaggtcttgttccatgtcaacaatggtgctggcaggataacagctgcatatgagcccaaaactgccactgcgctctgtgatggaaaatggcacactcttcaagctaacaaaagcaaacaccgtatcactctgattgttgacgggaacgcagttggcgctgaaagtccacacacccagtctacctcagtggacaccaacaatcccatttatgttggtggctatcctggtatgtacgggtacctgctcttccactcaaaaggggcactgtccctggaggaagtcttggttcaggtggatgtagaatagggattgagaaaggtacatggtttgggtgacaaatcctttaccattttagaaaggctgtttcaaatatctaagaattcttggaaaacttaaaataatctacacacacaagttaatcattgggtaagactgtgagaacactgggtctgatataaaggcagctgtatgactttaccgaagtaaatttcatgactctcagacttgggagtcattttagggctagggaatcgttttaggaaacaaccttgtgactcatctctctggtcaattttggattagaattatgtattttagatgttccaaggaattgttgcaaataataaacacctgttgtatgactttttttaagttataactatgccttaaaattttatatattaaaagtttttggccaggtgcagtggcttacacctataatcccggcactttgggaggccaaggtgggtggatcacttgaggtcaggagtttgagaccagcctggccaacatggtgaaaccctgtctctactaaaaatacaaaaataagctggacgtggtgatgggtgcctgtaaccccagctactcgggaggctgagacaggagaatcacttgaacccgggaggcagaggttgcagtgagccgagatcgtgccactgcactccagcctaggtggcagagtgagactccatctcaaaaaaaaaaaaaagttttctctgaattctgcaagtcactgacaccacatatgtggaagatattctcctaattttgatagtgaaaattttaaaaaataaaaaaacccacttgagattatttctgttgcttttgtgctatggatcgcatttcaacaaaattaagcaagatttgtcttctcttctttcctgaacagctggtgtgaagcaaaaatgcctgcgcagccagatctcgttccgcgggtgtttgaggaagctagctctgattaagagcccgcaggtgcagtcctttgacttcagcagagcgttcgaactgcacggagttttccttcattcctgtcctgggaccgagtcctgaacttgaagcagaatcctcagttggaatcattgctgatattttgaggagaagtgtatgtgtgaattaagaatctcttcagttcatatttcatttccaactcaggttaagtgtttctggggagagatgttgtgtttacgttacactaaaaccacatgtgcaacaaatacctccattaaatggtctaaaatgtaaattgaattccctggctctctttttaaacgtgtttgttaaaaaatctttatgcacattgaatgttctgttgattacttgatagtattttatgtttttcattttgagctttttaaaaaagtatcaatacagatgatagcagatca

SEQ ID NO: 87 - DNA, 32682 bp, Human
acacgacctcttccccaataacctatggaaattaaaaaattttaaaaaataaaatagctagtaatattacaaaacacccatatgatgcaatgttataccatcactcaatagcattttcagggccatttgtcctgtaggtgttaaatttattaaatacttattatatgccaaaatgtaaaacatggcttttctttactattcagacactataagaaattttgaggaacaaaggagatagagatgatgataagtgtggttgacagaattgggggaaaaaagtgatcttagaagaaatttaagacagtttagaataacagcactcaaagagtgtaagaagtttggagaagccttattggaagaggaattagaacacctggagaaacatacagtaagaagtgatgaaggtctactgaactgatgagctggaggagttggagggtgaatgtttcttgtaaaacactaaaatattattctgggcctctttttcctgttcccagaggtaagtcatatcatacctttgtctataaatgtacaagtctatcagacctttgtttatgaatttacaggcctcttagatctttgtctattaattcacatacttattttatccttattagtttgtgtttttaaaatttttatcaaattggtttcatactgtacatgctattccacaacttgttcttaacaacactgcttaatagtttcattttaagtgtggtgcttacgaaaggttctagtacaaagttacaaaaagtttctttctattgctggaatgttctgcgctccccaccattccactcccctgtccctaagcagcccccactttggtccgtgttgaatgtatcgaacatattttttttcacatttgttgcaatcatcacaaaagtcagagagtgctcagaaaaagagaaatggagatggtgggccctggctggtcaaaggccccagagacggacctagaaaatgttcaataaagcgctgtcactgaactggacctacacaggaccgggtctgggcaccctgtatcaatagcaatgccaccctgaccagtctcaggcaccaaagacgaacttaaaacttttggaaaaagattcccccatatatggtaacctgagctccagcttccccacttcccatggagtcgaccagaatcccagaggaactcaacagttaagcctatagagccagactcactgctctagtttcagagagtggtctggcaagctcatcactctggctagctggcttttttgtttgtttgtttttttcctgcacagtgtggaagattggtacacccgaatgtaccaatggtgcaggcacatcgatgtgcgtgcacgtgtgtgtgtgtgtgtgtgtaaaatgttgttttcatataatattggagggcacatggtatgatatcaacatgatttatcatggggatattaggattgatcacttggttaaggtggtgtttgccaggtttctctaccgtgaagttatcacttttccctttccatactctatttttggaagcaaatcatgaaatccagcccacactgaaagagagggagagggataagcttctgaaaatgggagtagctacatgtcttatttatattttcataagaaagacttgttatttaattgttcatttatgtcagtataaactcatatatattatatactttgggttataattcaatgccacattatttagttgctcaaagtatctcagctttggggcctctttttggttggctcccctatgcctttgacaggtctctatactttgttttctttctggcattgcaagctgcctcaggctcatcttatatttccctttcccagccctagaaatggccatttcttaaggaaggcctggttctctttattagagaatggttttacaaagatctgagtgctgggtattctcattgctaatgggatatcactgcttctagaccatttcagggaatggagctaagaaaggtaggtatgaatactaatattcatatcttcatttgaatacacacacacaaacataactgtaattatttctgtacgtatgtagctatctttctggttaatgatgagttcatactgatgtctctgactctaatccagaaccacaggacttattctagccttcctccttgcctctatgacagcaagaaacttctcttccactatctagcctccatctacccatttgttccacctcaggatgcatgtaaaggagtttcagagttataaacccatttctccatgaaaatcaaatttactaactagagtgcagtgtttacatacagttccttttgtctttagccatacgatttccagtcaaaacattattctccaaagtcatgtaggtcagctccatttttgcattaccatcttctgtgaagtcatgacaggtgactttgggtggctcattcacactgaacacaaaataagtttagggcactggcctttgacttgcctttgggcttgagctgtatgtgtgggccacccagcagctctttccacctaagtaggctttgcctacaatacataaaggtagcagcagtggtgacaggtatcctttacccagtgcattctctgccacaggtacccagggtggtcactccatttctctatagattccacatcaattgtcaggcagtctttgagggtgaccatgcctatctcttccaagggctttgaagaccatgggtctgcaataccagtggacccttccagtggatgtcctctcttgcctccatcgacatggttacattatgcttccctgggttggttttaaagtcctgccaaacatttcttggaggaatgtgaacactctttttgtttcaccttaggcccctcacctattcttactgttggtggttgtgtgtggaaggcaggggtgtaagtaacattaaaataggtcacattgtagaaatgctgtgatcatgtcctaagaatttaggagaaaacgtggtcgaaagatgtgttgttctctttatgttaagaaagtctgagtagtaaatttaacatgacagagatttgcatttgtgcttattatcagtgaaacacaagagtcactggaagccagaattgagggtgacgtgatggatgatgcaggatcataagtaatgatgtaaccagctttaaattaaatcaatggtaatcgagaactgtagaggcaagaagatttatttgtttcaatacgaacaacctccaaagagacattgtgtcttgagtaataacagcattgctactttttttttttgagatgggagatataaagttagcccggaatgaaatgcatttgacaataaagaacgtagttccacctcaggatggtaccaataggtaccatcagggtaccaacagggtaccaacagggtagacctgaacaggaagagatggtgcctgaacattaagaagaatcttcatgtgcaccaattggacagtaagaaactatgtcagtctggcttctatactcgttattctaaatctcaataaattaatacagtttacatgagtgcatgctggtgttgcataaatcagagggcactattaatgtaaaataaaatgcgaagggtgcctcctggaatttagcaacgtgggctatttttattactattgttaacattttagggatttggtttatgaaagggcagctgagattgtgataaggcagctattttgtgacagatgagctggatacatggaaagtacacatggaagcccatcattcctacccttccctgctgacctaacaagtctctttgctcttcttaactactttacaaagtccagacctgactacccttccaatctctttttcttcctgccttcaatgccctaatcagtttgaacttcatactattcattagcacaccatgcttttcatgcctcccttacatggattcctattatctggaatgtctttctttgtcttttttatccgtttaatccagctgaaatgttacgttctttgaggaaatttttctgaatagagctggtcatttctttcctgatggtccttgactctttgaacctgacttattacagcactcacattctttttaaaaacttcatgttaatatccacatttatattttattataataattgtagattttatatctactttaaatatatatgatctgagtcccagggcttgaatttgaacacacaaggttctgacccctgaaagctgactcatttaatggtgtcagttcattacatatctctctcttcaactagatagtgtttctcatcagaagggatcatgaattagaagtccatgtatctctcctggtacttagtgtaacctggtacatagtaagtatgcaattaaaattagatgaataaattaatttataccatgggctttaaatattctaaactacaaatcacagaatcctgacttacaataatttcctggacttccaaaatagcatatatagtatattgaattttataaatatttgaatcatgagaatttgtgctttaagaaaataaccatgattcattttatttttcaactttgaataataacaatttctccacattaagaagtatcaagaactgcgtgtccgaaggtggcagacatagtaatgtctcatatggtggtgtcacttttgtatcactttaattggtttagaattatccaaattatctctctcgtgtgagtaactgatgaataaatacatgaatacatggatggcaccaaaaaaagaactttggcattttgatatttatcttttggggaaggtagaatcttctgaccagtgaaatattttatgttaataaaatgttatgtgtgatggttgatgtacagggggagtaatagtcatttgcccattttacttaattcatgtgtatgctgtgtaatttcttcaacactagagtgtgaagcagttacttggacaatatctgaaaaatactgcatacaaatgaacaaattacttttccatatttactctctatctccattcacgtctcactcagttctttttgttgcaaaaatctttattcatttggtcaattgatatctgtgccctggagactggtttcttaaaaccccagcaaagagtctcaagggaagaattgaaataaggagctatttgaaataagaattgaaataaggggtgttgtaaataccaaatagaggaagtccatcctgtttgtgtggggagaggtcctcatctacctcaggtggagtaatttggttggtgacttgaagagccatccagatgagtattaggagtcataaatatcttcaagtgatggaagaggacgcctgcaaggcagacacatgctcccaagcttccaatgaggttatcccatgtctttgggcttggcactgggacattagagcagaggctacaaaggagcagagcacagagtttagctccaatggctgccaagaagactacgtgccaaaattaggatgcttctgcactataggaaagatgatctcttggttttaaaaactgtaatagaaaaaaaattgtagaacaccacaaacaacacccaaatactagctctacttattctttccactgcctgaaggattggctcttctatactcagaacagtcttggatgacacagctggcctccctaactttgtgatggggcagacaacagatgccatgtttggacaatactgactcagtgcaaagatgaccaggaggcattgggaatggcaatggagatttcttctgacctagcttctgactttttttaatgacagaaattgtgaggccacagtaaaatccactcacaaatttcttacatcccgcagaatacaagagagcacatatgttcttattcttttttaggaacatcaaaaataagagcatttctctaaataaaacagagcttgtttagaaataggtagtctatcttctgggaagtggcatgacttgcttaagaataataaataataattctagtttttattctatatattttctatgataagaatatatattgacaattctctctctctctctctttccctgtgtgtgtgtgtgtgtgtgtgtgtgtgtgtgtgtgtcttagtcttctcaagctgtcaaaacaaaataccatagcctgggtgacttaaacaacagaatttattttctcatagttctggaggctagaaagtttatgatcaagattctggcaaagtttagtttctggtgagggctctgttccaggcctatagttgaccaccttcttgctacgtccttatatggcagagaaagcaagcaagctctttgacattataggggtagcaatctcatcatgaggctcctgcttgcatgatctcatcgaaccctaattacctcctaaagactccatctccaagtgtcatcacattgggggttaggacttcaacatatgaatttgctaaggggaagagagagacacaaacatctagtccataacagacagtgaaatctcttgactaagtaaggaattttttctgaaacttctataacaatgagccatcactgaaccttgtgaaatgctatagtttaaatgcatgtgttgctccaaaattcacaagtaagaacataatatccagtgtgatagcaataagagatagagccttttgggacgtgattaatccaccctcatggttgcattaatgctcttataaaagaagctgaagggtgccctagtgcccttttggcattccctttcttctgacttgtggggacacctaaatgagaaacagtcctcacccggcacagaacctgttggtgccttaatcttggacttcctggtctctggaactgtgagaaaaacatttctgttgttttcaacttacccagtttcaagtgttttgttatggtatcacaaatgatctaatggactaagacattaagaaaagggagtattagtattcagcaatgatgctgatgatggcagatggccatggacaccctttgttatttctaataccctgtcattgctatagaagctgggaagagaaggagtccatatgaaaaagtcattacaaaaaaagatttaggaagtgttattttctgtgcaagttattgttctaggagatgctttaaaagtgtttttctctcaagcagttgacagtctctttgagcatgtggaccagttctgctgttttaaggagctatgcccagcctagcataggcaaccaacttacagaataagaaatgctgttaatggaacatagatttttgtaaaatgtattttcagttggcccttgacttactttgctctatctctgcatgacccgtattgatgtcttagttcaccttgctgaccttgaggcacttctatccttttaagtttggcaggcaagattggttgcctaatctgactgactcctttgaatttgttcccgtgtgggagggagaaaaaaatgtattttttttccctttacaaaccagggacaagatccctttgatgaagtgaaatagtcttctttttttaagcaaatactttatttataagtataatagcttttggggggcagcaaatgggaaaggtgaagtcttgtactctagagcatgattcaaatagataggctcaaattaaacaaatggagggatagtttgttctgcctaaaagcagtaataggaggggaatctagaagctgggtctggatgggaagacattaagaaaggagagggagagagagcaagcaagaaggaggtcggtcagggctctacaagaagagagtcaggtggtattgatacgagtggaaaagatctttttatgttttatgcctagttccttgatacaaacttgtggtggggggttcttgaaaaagtgattggggactatctgatctggggtttagggcagggaagaaacagcatgtaaaggagaaaagacagagcatttgttaaagagaatttaacagcaagaggaaataagaaccaatgataccaaggataaacgcagtccttaactcccctatcactgaattcttagaaatatgggggtaggggtggtggtggtaattctgttttctccccataggtgagataagcattgggttaaatgtgctttctctctctccctctcctttcttaagaattaagggacagactatgggctggaggactttgaggatgtctgtctcataacacttgggttgtatctgttctatggggcttgttttaagcttggcaacttgcaacagggttcactgactttctccccaggcccaaggtactgtcctcttttcatatctgttttggggcctctggggcttgaatatctgagaaaatataaacatttcaataatgttctgtggtgagatgagtatgagagatgtgtcattcatttgtatcaatgaatgaatgaggacaattagtgtataaatccttagtacaacaatctgagggtaggggtggtactattcaatttctatttataaagatacttatttctatttatttatgcttgtgacaaatgttttgttcgggaccacaggaatcacaaagatgagtctttgaatttaagaagttaatggtccaggaataattacatagcttacaaatgactatgatataccatcaaacaagaggttccatgagaaaataatctgaaaggtttaataagttgtcaaaggtgagagggctcttctctagctagagactaatcagaaatacattcagggataattatttgaatagaccttaagggttgggtacattttgttcaagcattgatggagaaggagagtgaatatttgaaaacattttcaactaaccaaccacccaatccaacaaacaaaaaatgaaaagaatctcagaaacagtgagataagagaaggaattttctcacaacccacacgtatagctcaactgctctgaagaagtatatatctaatatttaacactaacatcatgctaataatgataataattactgtcattttttaatgtctataagtaccaggcatttagaagatattattccatttatatatcaaaataaacttgaggggatagatcattttcatgatatatgagaaaaattaaaaatcagattgaattatttgcctgtcatacagctaataattgaccataagacaattagatttaaattagttttgaatctttctaataccaaagttcagtttactgttccatgttgcttctgagtggcttcacagacttatgaaaaagtaaacggaatcagaattacatcaatgcaaaagcattgctgtgaactctgtacttaggactaaactttgagcaataacacatatagattgaggattgtttgctgttagtatacaaactctggttcaaagctcctctttattgcttgtcttggaaaatttgctgttcttcatggtttctcttttcactgctatctatttttctcaaccactcacatggctacaataactgtctgcaagcttatgattcccaaatatctatctctagcctcaatcttgttccagaagataaaaagtagtattcaaatgcacatcaacgtctccacttggagggcttaaagacgtttcaacatacaaaccggggagttttgcctggaatgtttcctaaaatgtgtcctgtagcacatagggtcctcttgttccttaaaatctaattacttttagcccagtgctcatcccacctatggggagatgagagtgaaaagggagcctgattaataattacactaagtcaataggcatagagccaggactgtttgggtaaactggtcactttatcttaaactaaatatatccaaaactgaacatgtacttagttactaagtctttgactttatctcattcataccactcagctttatccaggccacttatttgacagtattattgcgaaaacttcctaactggtctccttatcatagtcttatccccttttgaaacaaaagagacagtttcaaaatacaaatatgatttttattagctcccttttgttgtctataatagtcccagaaggagttataaactccatttaaaaagtctttgagatgtggcccttgccaactttgccaggaattcccaatatctagtattttctactattaaactttgtgcctcttcaaaactgcattttctctcattccctaagtgtgcattgttttcccttaccggttggtttttccaccaccttttacattttcctggaacactataccctccctcttcatttggcccacctctaattttctttcagatctccatgaagatgttacttcctccaggaagccttatctgacccctccaaagatgtcatgagttcctcttttcattctactaatcacagcatccatcacaccatgttgtgattactgatactattgtctgtttctctgattaggcagtaagctcaacaagagctacatggtgcctgtctcttgttgctgattattcccatccaaaaacagtgcctggaatgcagacttaacattttattgaatgaataaataaaaccccatctatcgagtgctactttgtgcaagacccggttctgaggcatttatatttattgatttatttaattctcatttaaccatgaaggaggtactatcactatccttattttatagttgataaagataaagcccagagaaatgaattaactcacccaaagtcatgtagctaagtgacagggcaaaaattcaaaccagttccccaactttacgtgattaatactgtgctatactgcctctctgatcatatggcatggaatgcagacatctgctccgtaaggcagaatatggaaggagattggaggatgacacaaaaccagcataatatcagaggaaaagtccaaacaggacctgaactgatagaaaagttgttactcctggtgtagtcgcatcgacatcttgatgaactggtggctgacacaacatacattggcttgatgtgtacatattatttgtagttgtgtgtgtatttttatatatatatttgtaatattgaaatagtcataatttactaaaggcctaccatttgccaggcatttttacatttgtcccctctaatcttttgatgagatgatcagattggattacttggccttgaagatgatatatctatatctacatctatatctatatctatatctatatctatatctatatatgtatatcagaaaagctgaaatatgttttgtaaagttataaagatttcagactttatagaatctgggatttgccaaatgtaacccctttctctacattaaacccatgttggaacaaatacatttattattcattcatcaaatgttgctgagtcctggctatgaaccagacactgtgaaagcctttgggatattttgcccatgcttgggcaagcttatatagtttgcttcataaaactctatttcagttcttcataactaatacttcatgactattgcttttcaggtattccttcataacaaatactttggctttcatatatttgagtaaagtcccccttgaggaagagtagaagaactgcactttgtaaatactatcctggaatccaaacggatagacaaggatggtgctacctctttctggagagtacgtgagcaaggcctgttttgttaacatgttccttaggagacaaaacttaggagagacacgcatagcagaaaatggacaaaaactaacaaatgaatgggaattgtacttgattagcattgaagaccttgtttatactatgataaatgtttgtatttgctggaagtgctactgacggtaaaccctttttgtttaaatgtgtgccctagtagcttgcagtatgatctattttttaagtactgtacttagcttatttaaaaattttatgtttaaaattgcatactgctctttcattgaagaagttttgagagagagatagaattaaattcacttatcttaccatctagagaaacccaatgttaaaactttgttgtccattatttctgtcttttattcaacattttttttagagggtgggaggaatacagaggaggtacaatgatacacaaatgagagcactctccatgtattgttttgtcctgtttttcagttaacaatatattatgagcatatttccatttcattaaatattcttccacaaagttattttgatggctgtatatcaccctactttatgaatgtaccatattaatttatttcctggtgtgggttatttgattttataatcttacctttagaataatgaaacacctgtgaagctttagaaaatactggtgcctgggtctcaactccacagattctgatttaactggtctgggttacagactaggcattgggaattcaaaaagttcccccagtgattctaatgtgtagccaagatcgggaacccttgtagacagggatgataggaggtgagccactcttagcatccatcatttagtattaacatcatcatcttgagttgctaagtgaatgatgcacctgacccactttataaagacacatgtgcaaataaaattattataggacttggtttattagggcttgtgctctaagttttctatgttaagccatacatcgcatactaaatactttaaaatgtaccttattgacatacatattaagtgaaaagtgtttctgagctaaacaatgacagcataattatcaagcaatgataatttgaaatgaatttattattctgcaacttagggacaagtcatctctctgaattttttgtactttgagagtatttgttatatttgcaagatgaagagtctgaattggtcagacaatgtcttgtgtgcctggcatatgataggcatttaatagttttaaagaattaatgtatttagatgaattgcataccaaatctgctgtcttttctttatggcttcattaacttaatttgagagaaattaattattctgcaacttagggacaagtcatctctttgaatattctgtagtttgaggagaatatttgttatatttgcaaaataaaataagtttgcaagttttttttttctgccccaaagagctctgtgtccttgaacataaaatacaaataaccgctatgctgttaattattggcaaatgtcccattttcaacctaaggaaataccataaagtaacagatataccaacaaaaggttactagttaacaggcattgcctgaaaagagtataaaagaatttcagcatgattttccatattgtgcttccaccactgccaataacaaaataactagcaaccatgaagtgggtggaatcaatttttttaattttcctactaaattttactgaatccagaacactgcatagaaatgaatatggaataggtgagatattttgtgtttttcttgtcttttctctatatcaaaattttttaaattataaaatttgcattaatttgtcttgatttattattcatatttattattccacatggagaaaaaatatttaactgatggatatatttaaatgaaagataaacttgtaactttacaagaggtttacaaagttatagcagtgtttaatggatgaatggtttgtatgtttcatgttgaattaatttttacacttcaatggtatgcatattaactttgaaaaattatatatatacacatatatgtacatatatatgaatataaataaaattttatatgtgaagaagccagaattatgctccttcacataactccctcagactagtaaaatagataaaatctttgtttttaatacagaaaaatgggtcattatttgatggtctgaagaagaaatattgtgactgggatatgaatggcaaaccgtagtataactatgttcaaaagaatgcctgaaatatatttttaaccatttgactttcaggacagttacagcactacagtacagggaaaaaccaaacaactggaagacaaaatctggattttagtgataggtctactataaattatgcttgttaacttcattccttagtttcctagttttcttttcctcaagtataaaattaagatgcttaggttatccctaatgttcttttaattctgaaactgtacagttctaactgaaacacaaacattcatatgtaacaatgattactttcttggttgcagttgaaaacacgtttcatgaagtttattttgctttccagcttccatattggattcttaccaatgtactgcagagataagtttagctgacctgtaagttttgcttatataaatgtactttaaatgtgtaaagcaaggataagtaaatacttaaataaaattgggtacccctgtgagctcttaaaagcacaaaagcaatttggacaatttcaagaaaagttactcatactgaatatcaacttgatgttgaagaggttaaactgttgactaatgtcttcgacattgaccttttgattccttgaaatctcatgagtcaaaccaaatcagattttagaaactgaagattagtgtctgatcagtgacagccatatactaattcaggaatttttctcatcagtaccaacagggtgatattataatgttttcttttctgtatactatttaaatcttagcagcaaaccataggtgataaaatattctatttgctgttatttgtggagagtatgttagtctcttggatgtctttccattccacattttaaaaatttctaacaaagaatttaaagtagtgtgttgctgttactccttgcacatccaaacctgcataaggattgctttgagtcaatccatgagcactgtagtcttgggttttagaccttgatcatactgggaatagacactgttagaggtctgtctaattaccaatttttttttgcttaaatttaaaagtaaccataaagaatatagataccctcaattatgggtacattacagtagatggatggtcacagaaggagaaaccactcttatgggaaatccacttattttagcctttaacatctatatgtatatttatggcaaaagaaaacaagaaaaagactaaagtttcttctcagatgacctggaagctaattttacataattttacaaatcaaatgtctaaacagattacaacataaatagaaaacaaaacaaacaaatgaaaaactatacttgagaaaaataagcttgctgcaggtctgttccttaaggattcacacgtatttttgtttcagggctaccatattttttgcccagtttgttcaagaagccacttacaaggaagtaagcaaaatggtgaaagatgcattgactgcaattgagaaacccactggagatgaacagtcttcagggtgtttagaaaaccaggtgagtgaataattttaaaaaagcattgtgatatttgacaaaaatttagcatgctgaagagaagatacaaaaatagcagtgaaaaatgcatttatatatttgaagagctattgtatgaaagagggattagattcattctgaattgctaaagagggcagaagagaacaataggtagttattataaagagaccatataaatatgatgactgagagctaaggttctgaaataagattatcttgatgactatgggcatattaacttttttgagcttcagttttcttatctgtaaaataagggatgataatagctcccatttcatagttagcatggaaattgatataacagcaatagtagctaacttttattatacacacaatgtgactggcattattctagggagcataatgtgtatattgataataaaaatattttatgacataggggatagatagcactgatgaatcagaatggttgtccagtgagtcaagagatgctggctcgggcttctgggcaggatatcagctttgcttacctatatttatttattaaacatttaaaataatccttgaagatagatgctaatcttccaactgaggaagctgaggctcagagaatttaagtaactttcttatgggaaccaccaaatggcagagccaggatttgaactagaccatctggcttaaaattgacagtcttagtagcttcattacactataactatagtgaatgtaagatgcatagcacatcgttagggttgccaggtttagcaaacaacaacaaaacataatacccagttcaatctgaattttagataaacactaaatacttttcttagtataaggatatttcattgtagaagctcaacaaataatatttattatttattttatctcaacatagaaacaaacttgataatgattagaactctccaattataaaacaacatgcccagagaatactctgttatggtggggttaattaggtggctgaaagacaatgtacctggaatatcatagaagagatgctcctttaaggatatagtttaagttctttccaactttgaaatttatgaattgacaaaaatttctgttttgcatctctatttttgtcttgttctgataatcttttcaaaatgtgtataaaaaaacaagaatacattatctattgcaactttacaaccaattagaggttcaaggtaatgttacagatcgctgatttattcttgtaaattcaaaggtatgtcttttaaatgaggattgggaattagaaatcttacgtaagccttccaggattctctaaatattactgtagcagctataaaagctacataaaagttccctcagatacatgaaacacatgtattcctcagatgctttctgtggaatattgatgctgtcatctgagtttggtaagggtaagtcacagaggaggaaacacatacattttaaaacattttagctaaatatgtaattgtggccaagaaaagtgtttttttaaaaaataattatttcatttcaaaatcatttttatttataattgaaaataatatgcagttttttattgtcttgtaaggatggcatgtaaaatgagcatttatgtctgaaatgtggtatgtctgtgtgtgtgtgtgtatatgtatatatatgtatgtatataccataatatatacatatgtatttgcaattccaaaagttacatctttaatgagaatcatgaaaatattattttgctcagtttctttttttatttaaatttaaatttaaagttctggtgtacacgggcaggatgagcaggtctgttacataggtaaacacgtggcatggtggtttgctgcacctaccaacctgttgcctgggtattaagcccagcgtgcattacctatttttcctaatgctctccctccctgcactccactccctgacaggccccagtgtgtgctgtttccctccctgtgtccatgaaacatggtttatatatttataaaagtttatatatcctagtccaaatttttgataacacaaaaaggaaaaataaaataattcaaaattgggaaagagaaacaaaagattgcatggcttttttccttttattgtttggacattaaagtctcattttccataaggcagcaaagaaatctatttcatcaggctgaaacaaaatacattagaatttgtatggaaaatttttcagaatctatagttctgattttagacattagaaaatgtttcatgtgtcttatagatttttaaagcaaagttagttgtctttctccaaacataaaatatttcttatagctacctgcctttctggaagaactttgccatgagaaagaaattttggagaagtacggacattcagactgctgcagccaaagtgaagagggaagacataactgttttcttgcacacaaaaagcccactccagcatcgatcccacttttccaagttccagaacctgtcacaagctgtgaagcatatgaagaagacagggagacattcatgaacaagtaaggatccagtttaaaggtagatgcaaacctcagaaacacagcaatggcaagcctaatttagtatttttgcaatgtactcatgtactcccagtaagaggtataatgtttctttggtgttgtgtctgctgaggtcccagacaaggtaattaggagagcaacattcaatgtaacttggtttccatagcacgctagatgtagtacaaaccacaggacaaacctaccagaggttccattagtcccttgagagatatacaccttttttttttctttttacccattctactctcaattttaccttgttcaagaatatattagtattgcaccaaattgatgctttccagagccatatattggtgttttgtgttcacctaattgcctagaaataaaagttagagatccaagcatggtcaagcatggtcaagatacacagacatggcaaaggtttactgaacacttaggatgttgtggggccgggcgcggtggctcacgcttgtaatcccagcactttgggaggccgaggcgggcggatcacgaggtcaggagatcgagaccatcctggctaacatggtgaaaccccgtctctactaaaaatacaaaaaaaattagccgggcgtgatggtgggcgcctgtagtcccagctactcgggaggctgaggcaggagaatggcgtgaaccctggaggcggagcttgcagtgagccgagattgcgccactgcactcccgccggggccacagagcgagactccgtctcaaaaaaaaaaaaaaaaaaaggatgttgtggaaacatgtctgcttgcacagaggatcagattaacactcacaaacaaactttgaagcctccttctcctcttcctcttcattcttcttctttcccccattttgttgataggaaattgaaggttggaaggctaaaacaactggctaagggcacacagctagtacatttgaccccaggttctctgttggagaagcctgtacgtaactcttcatcacttctgccttccatgttacttcctaaaccagataaatagagagattgcccttagaacatctctgctatggcgactatccaggtgcataaccccattctgcactgacaagggataaaatgtccatctttctgttgcacttagcagaagtctggctttgctgatccctgaaacatatctgagtaggcttattgaaaaggaccttttaataagaatcatggttagcatgtctgcctattttcttctcataatagaatctggtaccatctgtcagatatttttccccccaggatctttagtgaggaaaattttgacaacatgtggaaaaaatatgatgattttccccttaggaacacagtaaagacaaagtcaaatgcattttgttgttgttgtttttgaatctttaaataaatcccagtgtccagttccaagcagtagtagtcctatttttaggtgtttataaatcttctagctctattttatttcacagattcatttatgagatagcaagaaggcatcccttcctgtatgcacctacaattcttctttgggctgctcgctatgacaaaataattccatcttgctgcaaagctgaaaatgcagttgaatgcttccaaacaaaggtatcatatttgcgtggatatctgaaccagtactgtagtctatgactcattaaaacaaaacaaagttaaaaatgaaaacgtgcttaattgtggagagtatcgtttttggaatagagaaatagttcagcagtctgatattcttcgagtgaacaaaactggatttgctggtttttattatctattcattaagtcaacaataattttattattaaggaagtgagtttgatgggataaagaaggaaagacagacagacagaaagagagaaagagagggtgctataaatgggaaggagtaagtgaaagaaaacggagaaaaggaggagcagaggagagagaaaaaatgaagaactatgataaatgctttatacttactgtttttttaaaccttagaacaaatttgaggtgtaagtatttttgtcctttaacaaactaggaaagaggtttagagaagaaaattttttttaggtttagagaggtagaataatatccaccattaactacttgctaccagcagtcctataacaaaaatttcctgagaactgactactctcagtgtcaagccgtgatacaatcgtattttttgtaactgagaagacacttaagaaattagcaggcttcaatttgtctttaagctgtttaaaggtacagttgttcatttatgatccccagtataaaagttatgtttttgtttcaaggtactttgagtaaatttgtctggcacagatgcatataaactaacccaaaagaataaatgagtcaataatattctgcgataatgtatgacatttataatttttagtaaaaaacatattttatggaatttcattttacctatacttgttgtttttctaaatattagagcttgtaaagaaaatgttagtatatgctttcatgacattttgtttcctctacatctaggcagcaacagttacaaaagaattaagagaaagcagcttgttaaatcaacatgcatgtgcagtaatgaaaaattttgggacccgaactttccaagccatgtaagttcaagttctatctagggaagagggtgagagctacagaactaccattttgcaatttgggttcgtttttttaattgttgctgttttagagaatgaagacccctttgtgacccctttgatgagggctaatgggattagaaccatgaactcttaggatcagaaggaagctaacggataagtcagtttaacacttactaaagcctagctgagataatacatagaaaagacttttaaagtttatgttatttacctgttctttaagacacttaagttctggcctgccatcaaattatacctcatcactagaccatatttttctagctcttctacaaaataagtcagccttcactgagtgtcatttaaaacttttgccttaacaagaaattctttatattaattgtgtttcttaatcttctataaggctctttatagcatttattgcttcccataaaaatattcctttgaggcaataatattagaatctagtgtcaggagaaaagaacattttaaattatataacttctttaaagtactcatcaactcttttatgataaaacatttctagtatatgaaaatatctgagctgctaatcgaatagtagtaagtatatatattcagagtttatttgattgctgtttggttaaataacacgttaaagcatattgtagacaatggaaatctagaatgaagtttttagtaatagaattagttctaaagactgaaatttcttcttgtaagaagtcagatttatgccttaactaccctccaactcaattagaaattgaaagattaatttatgacctactttaaaaaaatttatcttagtaataaaatagaaattgagatagtattataatacccttatcatttgctatccataagtgaaagctaagtggtctaaatttatagagaagatccatctttatcagaagcaggagtaacactattttctctaggagcaatggttttacaaagacaactcttaaaatttaatgaaatatgcagaggaaaccagaatttttatttcttacttcttttttggccacattactctcttggcacactggtatgcctgaaatgtttaatctgctccactttcttgtcccatttcattgatttgcacatacgcctcctttcctggattctcagaagtattttttaccccagtaaaaaatggttctcattttcatggaattttccatttcttaattgtttatccttttaaagttttatgtccactcaatacaaatgctcagcataagggttgaatggcaaaaataatttaccttaattcttaagacatgttttaggaaaagataaattatttctaaaccatttgtggggccagctcacagtttacagagctaccaccttgaaagatatggctggaatcaagccttaaaacatgtttccttttctttttaaacaacaagggaatttcagtcatttctctttgaaacttctactgtagtaatactctataaattctattttattttgacagataaccaagaaattaatttctaatttcttttttttccctagaactgttactaaactgagtcagaagtttaccaaagttaattttactgaaatccagaaactagtcctggatgtggcccatgtacatgagcactgttgcagaggagatgtgctggattgtctgcaggatggggtgaagagtcttgcttcttaaaatagaagattttcactcccttttctttctttttgtctcattctaaaagggagaaggttgtttgacttgaattggttacagagtatgtaaactaggtgactccttaaatttgcagaattctcggtagtaaaacttaaaccatcttttgttgatcctggctttcactttagctatacccctttttgtgaaaccaaggctcatctatttcttacttctaaaaaaaccgtgggaacttctcagaaggcttctccatagttacttggaggacgggaggaaactaaggtttaatgtatttattttttcattcatttattctttcatttgacaaataaatatatattaaatactttctatctgctagccactatgacagacacttgttttaaaagcacaggctgacctcaaggaattcacagtctgataggagagataagacagtgacctccttggagttagggactgccttggtttactgttatctccatagcacaatgcctggcacatggaaggcattctataatagtttgttaaatgaacgaatgcaataaaaattgcacaagtaactgtcctaccaggtaaaaagctagccttgccaaagacaagtgtgaataaagtggtctcggagaattagaaaacaaaatttaaaaaacccagcaacagtttcttgagtgtgctctagtcagtggtggtttaagcagtgtggcattggcttattttggctaaccctagacttcctagattttacaagagaggactgttgaccctcagattactctgtctctgtgggctccatgacataccaaagagattaaaatccaaggagcttaaaaattactgctcttaggtactcaaatggcttgataaccagcactggactatggtttccagaaggctgaaagtgaagataaaatgctcatttcagcccatccgatggcaattcagtgagatgcttgaagtaagcaagaagccaaggctgcagaggaggcctgagagtgacagtccctgaggagctggggaagaagtgggaggaggcagcctggcaggcgactgtactactttacttgtttttcttctaaaaatatggcatactaggaaaaccaacaagaagtattttgtttttctttgagctcagttttcccattttgaacggacaattttactgtttctcgttgtcatttttaaaaagttaattttttcaatttttggagctcataaccacccttttcctttaaagtggaaacattaatttcagcatgatatgtaagttggattttgatagctgaataatgggttctaattatctttgctgagaatgtacagaattttcagtcccatgacaggtatatatgtaagctctgcctctctctggccacttaggtgcattgccattttattatctatagactgccctctgaaggtcatagtcagtcactgcagtatgttctgataaagatgattatcattcttacggaatttctcgtggagcagaaagtttgctctccatgttatgataaagatgattatcattcttacggaatttctcgtggagcagaaagtttgctctccatgttatgataccagttgcaagtgttgtttaggggcaaatttgaatgctaatagaaatacatatagcaacatgcatcctattttatttgagcacatttccctcttatttgtaaaggttttcaattaaaataacataggatttagcttacaactatggaaagaagaattgaacaaacaggtaagtggaaaggaatgagaaaaggcaaaagtggggagaaagcactaaaacgggagacaagttaaaatttctttttaattgataggtcacgttctcactctatttgcctttaagggaagaaagcaatcaagttaatatgttttccttcattgtatagtatgtaactacggacactattagaggagggatttgtgtagcacttaggacattatacttgataatttccaagggtctttctagatttaaaagtctgattctaacgtagtaataaaaataaaggcccaattttctctttaatattggctgaagatattactctattattgcattaaaattaaacattcacacattgtttgcactgctaaataaaattatgtaatttcttcttctttccttcctccttcctccatccctctctatttccctttccccttccttctttcctggccttttttccttctttctttgttcccttctccctccctcccctttcttcctttttctaaagctggctttgagatcctttattaaagaataaatctttaaaacttatactttattttctctgttgcaggaaaaaatcatgtcctacatatgttctcaacaagacactctgtcaaacaaaataacagaatgctgcaaactgaccacgctggaacgtggtcaatgtataattcatgcagaaaatgatgaaaaacctgaaggtctatctccaaatctaaacaggtttttaggagatagagattttaaccaattttcttcaggggaaaaaaatatcttcttggcaaggtaacacactctgtaaatgcatgttcatgcaagtaaaaatgattatgtggctgacagatttgcgttgttgaaatggagagtgatgattatggtttttgagttcaatatgtgaggatatttggctagaatgttctgagccaaaatagatttcagtagataaccagggaataagtaatgggatttggtgtttaacggtgaagcgttcaccactgtgactcattaactgctttgcttatgaagctgaattttatttcacatcaatttctctggaatcagaagcattgtcatcctgtaaagattactcatatcaaggccaccattgaactctcaaataggatatggatatttttgtaataagaagagttcatgattaagaatgaactcttgctacgcatgttaaaaaaaaaacttttctccaaaagataacacaagagataatgctaggtagaagaacttttataggaacagcttattggctatgtattaaatacatgttttgtattttttaagaaaatcaaaacatgtttagagacatttgcagtacagtagtttgttttaatacaactgataggtcacgttctcactctatttgcctttaagggaagaaagcaatcaagttaatacgttttccttcattgtatagtatgtaactatggacactattagaggagggatttgtgtagcacttaggacattatacttgataatttccaagggtctttctagatttaaaagtctgattctaacgtagtaataaaaataaaggcccaattttctctttaatattgcctgaagatattactctattattgcattaaaattaaacattcacacattgtttgcactgctaaataaaattatgtaagctagaataaagttcagatttaggagacacatagtgacaactgattggtgacagaactaatcctataatctgggaatacggttagtaaagtcaagaattacctttaagtttacacatccatgcacatctaaatctaattgtttaatagaagcagttcttcagttgcaaaggttctttgcagtagaattttctcagccaggaatgatcttcccccagatatttgcatggcttctttcacttagctgatctctgttctgatatcagctgcctagagagaattttcttgaccacattcaaagttagtggcctctccaccttgggtatcatccttttttctctttttcatctttatttattttcattgatttatcgctaactgaaatgagatggcctatttcttgtttatttgttctgcctccctataatgtgtgcttttcagagggcaggtatttatcttagacatcattgagtccgttctgcttaaagcaatgctagcaaagagtggacactggaaaaatatttgttgaataaatgaatataaagtccgtaattgaaaagtcaaattgagagatgcaggagaaaacaaaaagccattttacaggacaatttgaaggatcacagtctgtattaacagttttgccattcatataattcaaatcatatttgattttcaggtttatttatttgaatttaacttccacatgccatattatataggaataactggagaagtgatggctccttttgtctcttagttccaataacttgaaatatttttctccacatatttcagttttgttcatgaatattcaagaagacatcctcagcttgctgtctcagtaattctaagagttgctaaaggataccaggagttattggagaagtgtttccagactgaaaaccctcttgaatgccaagataaaggagtaagttgctctagaattttaggggagtatgaaaaactggattgatatcatctgttaaaaatgctgtttgtttgaaagcctctagttttcaactagttgttagccagttatatctatttgtctagatattaagctgttattaactagcagtcagcagctagtggcttgctttagaaacaaaaatgttaattgcttctcagccttttggctaagatcaagtgtagaaataaaaatgttaaccaaaagtcctttgatccacaaataaaggtagtattcattattcatttttggataacttcagaaaggcaagaatttggtacagaaagaactgtaaccatttatccaaagattgagttttgccattaaatgattttgtgatttataaaatgttaaacttaatctccccaaaatccattttctgtaattatcaaaatttacactttaccatatttaatatttaaacatctctgattggttttataatagtatataatattgatcaattttatatacaaagttatgcatccaagaaaagaaaaatgtatatgtaataattcttcattttcaggaagaagaattacagaaatacatccaggagagccaagcattggcaaagcgaagctgcggcctcttccagaaactaggagaatattacttacaaaatgcgtatgtttttgtaaacagtatttttagtgaattaaaattattaaagagaatgtagccttccccattctcctcctttggaagcaacaagaatgacctgtgaggtctgatctgtggtattgactttaagttccccatactgtgcaaatttttgcagtaaagatatccattctgtcatagtctgtccgagttaaagcaccaaaagatcacagttaaaatcaatgaagctccgaggttgagaatacaagtcaggcttcctcctggagtttgctttttcattgtgatatgcttctataataggagtacagggagtggttgttagagtaaatgcatctcaaaagttggttcaaataccatgtagatgaaacaaacgagctgacctcatgtcttctggcatgagagtagagagtctgtgagaagaagcaaggcggctaaaaactcatgaatgactcagcaggacttagttaaaaaatgcttctttcaggtttctcgttgcttacacaaagaaagccccccagctgacctcgtcggagctgatggccatcaccagaaaaatggcagccacagcagccacttgttgccaactcagtgaggacaaactattggcctgtggcgagggagcggtgagtgtctgcttggtttggtcccatctcatttctgccctgtttgacttgaaatagcctcataattcccctctagggaagacggtaaaaaccaatgtagagatggccttaggaggcttgtttgattagtcacggttggaggggtgtgagaacccagctctggatggctggcatgtggccatgcttcctattcctccagggtggctggtggaagttcagccagtttagtcaacaatatctgagccaactttatatatcggaaagacagaacgaccaacatgtaactcataattcataacaattcataattcataacttcaaatcataatttctgctttttgttcatatacttactttgatgttttaaaaaagctttatctttgattgattaaaattagtcatgctattttagccatatttatattttcaccttttgtaacatgatattattattatgacatcaggaataattggttccctttcgcagggtatagggtacagcacaggataagtattatgttctgaatagtaaaatgactttcgagtcagtaatgccaatattctttacttcctaatgtcactagtatcatacataagattacaggatgaattaaaaatatttttcctataaagtcataattgcaaacaaaattgtctattttatcctttttcctctttttcataatggggagttatttgctgttagtcttcatgtcatacattttttccccaaaggttaagagtaaaaggagagttcttgtgattaaatgtcacctcaattgtttgttgaatttcccatgctgggaggctgcagggatgcaggatggtgtaatggttcaggagtgtatgttccggaggccaccagccaacaaccgcattctactttcactattctttagttgtatcacagtgggaaagcaacttatgtcattaagcttgagttttttcatctgacatttgagaatacaaattataccaccctcatacgacagctgttttaaacaagataatctgcataactcacacagcactagtctgacagataaagtgcacacaaaacatattatttcttattacaagttattactaggtgattaagaaatatctcctaagtaggcaaggtagcaagattctacattaggaaagtcttaaaaacccacaaaattgctcttacttcttttcaattaggatgatatattagctgcaagtgtatacatgtgtatatgtatgtgaataaaaggggtaagtttgtgctattcttaccttcagatagtgattatcaaaagaaaaatggaaagttcaactaaatacacatgggaaacataaaggcagagacatttttgtcctttagaagtgtgtatgtaactggaagcatgtttcaaatagctgacacaaatagctaaatgactatcctcaacatcacatatggaccatctgctactacttgctaaggcttagcccaaacaaatgggtaaatcctggaatttacaatataatgtcacatgatcctacatagcaaattttcctgtaatattaattataaattgctgggcattagaaattattgcagcagttttctgaaaaactgaaccaactttgtgactaatgcccaatctccttacttttttttctcattctcctaaccaggctgacattattatcggacacttatgtatcagacatgaaatgactccagtaaaccctggtgttggccagtgctgcacttcttcatatgccaacaggaggccatgcttcagcagcttggtggtggatgaaacatatgtccctcctgcattctctgatgacaagttcattttccataaggatctgtgccaagctcagggtgtagcgctgcaaacaatgaagcaagagtaagaaactgttacttgctagcatggaaaagaatgacaaccccaaagagtaactgagacttctacctcgctcacctaacactattgggctcactaacagagcgttactcccaaaacacttaaaatgcctttgaaaatagttttgtctcagtgtcttcacagtctcattggggaagcaggtctagaaaaattgacgagggtggacaatttcctgtttgtaaaaataatctctgttgtaactgttattgtgatatgtatttgggggttgaggaaaagtgggcaatctattctgaggaattagagtgtatctttgcagcaaatttgggtacttccattccaagcacaggaaacacatcattgaatctttttttacactatttacactttgaagagaataaccatcttatttaattcaaccatgcagtttgggtgttaagaaatgacatgtacatttcagttcattgtgggagctcttttgtaatggtgatggtcatgcaagtcaatggagcttatgttcttcaaactcccatgcattttaatcctcacttgttttgtaaatagtcttccttcattggaaaacccattcttctcttttttcctctatcacagtctgaggtatgtttcacagtatgataagaatgttgcctgttctggcaagctttttctattgctctggtctactttctattgctctggtctaagtccaacatgaaaggcttgctaagtgagcagtgcaggcaattagtgctgccagtgcccagataaggggtgtgataactggatgggcaggattcggagatctgggtctttgagtgtagataagacacagttaagaagagcggacaggaaaggatattcctgggggatgaggggagattgccttccactacacataagtatggtcaagtatgaaatagtgttttatccacaacctgcacaactccaggctggtggaacacttggcatgctttcagcctcaatctttctactgaaagtactagacaaggtgtgtgtggtcagtctggtgataggttgatggagtaagggtttaggctctgaaaattctctactaggaaggctgtagaaaaatagcattgcataacagacttctcttgtattttgttttgttttaaatcacaggtttctcattaaccttgtgaagcaaaagccacaaataacagaggaacaacttgaggctgtcattgcagatttctcaggcctgttggagaaatgctgccaaggccaggaacaggaagtctgctttgctgaagaggtacatgcagctcatttcatactcaaaatacttgctatggaattttctgtagtggataatgaaaggaagaccctacaaatttataactttaaaatattttcagagagatttaaatttcattgagaagcagattgagggattctataagatttaaaaaataatcacattttcttgcttaatattaggaaaatttataatattaaaatatattaatagaattagtaattttaatttatttcctagtagagaaacccataaagtgaatgtgtaaataattgacggtaatttagatagtttctggcctaaaattgatcaattcagctaaatggattaaaggatttaatagcaaattaattgtgcaaacagagtattaggagtctatttgtagaaaatgtttttgaactcatttagaagcttgcttttgtacatcaacagagtagtatttaggagttattttaattacatagtaattttagctggataattagccagattttctttaaccaggggattctacctaacatttaaaaaaattaccttttttcagctttattgaggcatgattgacaaatacaaattatatatgtttagggtgaacatgtgatgtttcaatatatttatacattgtgaaatgattatcacaatcaagataattggctaaattttacaaatctttagtttgtattgctacatatatttgaatatagcaacactatactttaaaaagatattctataacttagcgtttttgtcaattttacctttctcaccatgtaaaatccaaagacagatatatttagaaatgtagagtttttctataaataatataattagatgcatttgagtgtgtgcacttaccagtatatgtgtgtgtttttggtgggatcaggtagggtgggacatagataaccaaattagataaaactggtgaaacagatttgatgtgaagcatttctgaaaaacatgacacaagaagattaatgttctctaatctgagaagacatttatttagatatagagaacatgaacaaatagtagcagtgctttatctgcaaaccttttaatttctaataacttgtaatttgtagaggaaggggaaagattgagaatacgcattgatttggagattgttatagaagaaaactgttgatgtgaaagaatattgttttctccctggcttttactatcccaggttgttggcatcagagatgtgtttcttcatttttaacttagttaatctacaaacctatgaattcaccccggattgtagagtgttaactgtatgattggtataataatccatttctttatctgattatgtttattcttaattttcagggacaaaaactgatttcaaaaactcgtgctgctttgggagtttaaattacttcaggtaacaaaacattcagacaagcctgaatacaatgttgtttctccagaaatatcaatccataatgagatagatcatgaggagtgccattaattctcttaaaaatacatggaattcaaaaaaaagtttattttaaaaacacttgaacaaaattacgcacacaatgttaaattagtggctcaactatgcaaaatcctttttggttatttaaaagacttcaacaaatgctatcagaagactttcctacgtatccaatatttctctgatataaaataatagaaccagttacttactgcacctattagtttaattagtatttaatatatttttgctcatattgcaggggaagagaagacaaaacgagtctttcattcggtgtgaacttttctctttaattttaactgatttaacactttttgtgaattaatgaaatgataaagacttttatgtgagatttccttatcacagaaataaaatatctccaaatgtttccttttc

SEQ ID NO: 88 - DNA, 18194 bp, Mus musculus strain C57BL/6J
ggacttcagcaggactgctcgaaacatcccacttccagcactgcctgcggtgaaggaaccagcagccatgaagtggatcacacccgcttccctcatcctcctgctacatttcgctgcgtccaaagcattgcacgaaaatgagtttgggataggtaagatgctttgtgacttgggagctattttcctataacaaaattcttaaaaattcccatatttgcatctccaggtatcttttttttttttttttttttttttttttgagacagggtttctctgtgtagccctggctgtcctggagctcactttgtagaccaggctggcctcgaactcagaaatccgcctgcctctgcctcccgagtgctgggattaaaggtgtgcgccaccacacccggctctccaggtatcttgacttaagcattctatatactgttgaagaccaggtatagatctaagtggtagatagatttagatgtaatgtaattttatgtaagaggcttataaaataacagcagtgttcaacacaatcaattttggatgtgttccatgctcaatttttttttgatattaattatttagtagggtctcatgtctagttccttcgggttgacagaaataacattttcactctcaatctttttaaaagtgctaattgttcgactctctggaaagcctaatgtgaacaggccgactgtagcataattatgtccaaagctactaaatgaagccattttgaatattatactgtgagggagccaagtagtaaggggacctgaaagatgagtattagtactaagtctgcaactgatcattctggttaactttgttccttaatttttcagtgtccccaagtgtaaaattaagatgtctggacaggtggttcctaacaacttggcagttctaagacttcatggcttgggtttaaattccacaacgattgctttcccggttaaaatcctcacttgtccaagtctgttttcctttcagcttccacgttagattcctcccagtgcgtgacggagaagaatgtgcttagcatgtaagtttcgcttccatcaatgtgctgcagaaatggcgtgcagagataagtctaggcaaccgaatgtgaggtttgaaattacaggagcaaattgggcagctttaaggctttgcttgtgctgaatatcacactgataagcaacatgtttaacttcggtcaacgctttagatcttagccttgacattgactggagttccagaaagcaagccaaatcagattttcaaaactgaagaattaatttctctgcagctttgtatgggctcaggagcgtgtcttgtcagaaccaataggaagatattgcgatatcctctattttgtaagctctttaatatcaagtcataggaagtaaaatattcttagtttagttattgtggagaatattttattcctttaaatattgtctctgttctacttctttgacatttatagtaaggaatttaaacgtgtgtcactggtaatgtctgcatgtagaaagctggacacggatcactttgagtcaatcggacactagtgcaatctaggattggggctcagtcacgctgggagcaaatataactgaaggtccagtgaccttcatctttgcttaaattaagtaagaaaaatagtgtgaaaaatgtgggccttcccaggtatagatgctcagtgagcagtgaccccaaaagaggaagtatatttgggggaaatctatttattttgacttttaagacttgcacctgtatttatgggtgaagatgacagaaagaaggctagcatttccctctgagtgactcgaacccagtttcccgtagatctttagcaaagggctccttctaaacagatcagagcagaggaagctgtacttgaaaggcacgcgtgactgggtctcagcctcaagccgctctgcatgtggtctccttgcagagctaccatcacctttacccagtttgttccggaagccaccgaggaggaagtgaacaaaatgactagcgatgtgttggctgcaatgaagaaaaactctggcgatgggtgtttagaaagccaggtgagtgattagagagaaagccacattgacacttaaccaaaatttaggctgcagaaagatgtcaggaagttgtgggtttaattatctgaaaactgttttctggaagtagggttcgattagttctggaatcccgccgaacagcactgttgaagcagagcaagcggctgcttaaaggagctgagattaatacgagactcagagctaaggctccggagtaacgctatctgagcaaccacaaacacattctcttctttgagcttccatacctgcaattatggagtgacattagatccactcagagctgtcacggaggtttatgttgatgacgagtggcagtatattgcctcttatgcagacattgtggctgacagcattctagggatcactgcaaacacactgataatcaaaacgctgcatggaaggtgacacccgcagaaaatctgtccagtcaactaagagaaattggctgcagcgtatcatcagaattcctatcttatttataaatgttaatttattaaattataatatttatattttatacatatattacagtttacatactatgttatattatatatggagacatagtacatattatattgtatattatatattacatattatattatatatgaacaatccatatttgtcatgtagttataattttatatagtgttatatcacattatacaataataatttaattaattgacagattaattaaatctctatgataatcctggaaagttgaggacaattttctcatggaggaaacttaggaacagggaaatcactcctttggagaattatagtttggtagacctgaggattaaatgaagtcttctggctccagaattaggtccttagcaaggtgctcacactgttcagaacagcacggtgagtgtgaggcctgcagcaggttattcgagttgctggatatagcacgtacgcagacaggaacatcagtgtctgatatccaagtaagtcagaacttgagaaaaacaagcacgtttacacacccagttgccctggtatagaaacaaaatagctaccattctgtagtttactcctgtatggaaatgtgctttatacttgttggagggatttaagtatggaatacatacagcagagcatgggcacagggccttccgacggtgcatatgccaagggccgcaccctaaagaaagccactctttaccttccagcagccagcaactgcccgtcactcctcggcaaggacccagggtttgtgagcccttctccatccacacaggcgttttgtgtacaattgccttgttatgtatgaaaagtttttgcttcaatcttcctgcagtctctggcccttaaaatcctttctcccttcttctccaatggaccctgattcttgaggggagagagagagcctttcctttctgtagacatcccatttggggctgagcacatcatggctacttatcctctgtattttggccagttttgaacctctgcatccattaccatcccctgcaaatagagcctcctgggatgaagactggggctgcacaaagttctgccactctgtgtttagaaggcactctagtattatgcccattcagtaaaacaaatagagataggttcactcttagggcctataccatactcagccatgggttcttggcccagcttgcagtgccaggcctgagtgccaccctgtcagagagtactgtttgtcactctcaggaatctatgtcactgttgtatcaatggctataccttagccaggctgactgtagctcttagggtttacagctggggtaaccccgtagatgacatcacatgacttttctccccctagcggtttgcacatgcccttctggaattatgaaatctagccagtaagaaggcaacctcagacgcttctggctctagaatttatgggttaataagaatctccggtttgtatgttagtttcagtcactctttgttagtcagttaaaaaggcgtgtataaattatgcccaaagcacttcttattgcgcctttcgtattcagttagtgttcagggtaatgttgcaaatggggtggctcgtcactacaagttcaaaaggtttcttttaaaaggttgactgattctgtagccagaagatggcctagtcggccatcattgggaagacaggccccttggttttgcaaactttatagcctcagtacaggggaccgccagggccaagaagtgggagtgtgtgggtaggggagtgggggggggagggtatggggaacttttgggatagcatttgaaatgtaaatgaagaaaatacctaattttaaaaaagacaataataaaacaaacaaacaaacaaaacccaaccaaccaaccaaataaaaaaaggttgcgtgaaacaaacatggcggtgcaccactatggtctcagggcttgggaggctgaggtaagtggatctgagtttggggcgagtcttgtttccatcgtgagtttcaggctagccgtgacttcatcaggaagaaaccctatctcatcctcgtagagaatatcacaaaccaaaaatgaatatagagaatgagtcttcagtaagcctgttgtaatagttaaataaagcgattcctaaggtgggtgacttccttcaaaatactggtcctgtccaaatctcagtgaatttaggtgctaaggaagaaagcattttaaaataccgtagctaaatctgtaattatgactaatgaagggtggttctatatttgaagttcctcttatttttaactaaaaataatattcatttattttactattgtcatgttgttagaaggccaaaaggaatgtgtatctataaaacaatgattatataaaaagaggaaaatttctattatcttggggccaaacttttcatgaaataaaagagtgaaattcacttaacctaaaacaagataggaaagataaatcagtgcataacctttttacttttaaaataattatatctcccacacagaatgtgtgctaccaacagatataagtttaaagcccttcaccctaaaagctaccaaagaaactcctcccatcagactgagaggaaatacactgaacgcgtatggggatctgtcctaatttactggtctcattttggacactaggaacctttacacactagttcccgtggagttagatagtcgcctttcattaacaataaaagattttcttttctcagctatctgtgtttctggatgaaatttgtcatgagacggaactctctaacaagtatggactctcaggctgctgcagccaaagtggagtggaaagacatcagtgtctgctggcacgcaagaagactgctccggcctctgtcccacccttccagtttccagaacctgccgagagttgcaaagcacatgaagaaaacagggcagtgttcatgaacaggtaaggaccatccttgggcatccagtgggcagccagtgtttctgcagtccacatgtgcactccaaagtgtatacaagtagggaatatagccagagtatgtctgctgaggtctgtgcaggggcttttgttagacacacactgtgagatgcagaacacaccgcatgcagactcagcctctgatccgtcagcctccggaaacatagctctttctcacctttaatgttttgatttttgctatgcacaaaagtgcatcaggatcgcaaagaatgactcctgagagccaagtgttcatgtacacccacgaaactgataattaagaccatgcagtcagcttctgggataaatgtgcttgtcacaaatgcttgcgggctttgatatcaccctctacccttcctttcacctttaaaatagttcattttatttttgaaacaaggtcctagaggaccaggttggtcttgaactaagtatgcattaagggtgggtttgagcttcttatcctcctgtctctaccttacaggtgccaaggggacaggcatatacatacatgcatacatacaacatatatttacatgtctatctgtctatactgatagacatactgagagacagagacagagaggacaccttagggtagtcatcgaactcttcactgataaagatttgagctgtcttacgtagaagctagcctggctgattccctgatatgtctgacaggcttactgaaaaagacatctcagaaggaatcatagcgtcattgtttgttttcataaaagactctggattaacggattggatcttttttttctcctgaggctgacatgtaggaacgttttgacagcttttgaaaaaagcctgcacattttcccgtaacagcacagtagagaaaaagtccattggaccctgttgcctttgtggttggttaccccattcattaaataaattccagagcttagttcagggaggtggcagtcccttcatctgttacatgtttgcaaatctccaagtgttgtccattccacaggttcatctatgaagtgtcaaggaggaaccccttcatgtatgccccagccattctgtccttggctgctcagtacgacaaggtcgttctggcatgctgcaaagctgacaacaaggaggagtgcttccagacaaaggtggtatctttgtgaagctatctgaagctaaatggggtttagccatggcttgggaaaacagaattaaaggcagaaatgtgcctcctgtgggaaataccatcttctttctcatcctagatgaaagtcatttttacttgatcttttcaattatcgatgaaatttcattttctatttatagttagaaacaatactccataatagtaaggtataactttaggccgaagtaaaaatgtatttggatcagcatttactgaatctttaaagagagcagagataacagcaatgcatgtacccagaggaggtgatttagtgcttataagcccattagagtgataggattgtccctctctccttcagagcagaaaacaatgttgatacagagtaaccagcctttcggtaattgacaagtggaaaacatactacaagttcaaccagagccaaggaagctggaaattagtggggttgctaatgtgtccgcaaaatggagcatattccccacttctggcttgttttattttgccttttgaggcagactcttgttatatagccccaactgggcccaaactcctaagaattatgacggtagtgcaattctttttttttttttttcttgtcttttcctttctttttaactgagcaggagccaacaggctttaccccacctggagactggacaggtgcagctgtccatgtggtcccagtatcaaaatgatgacgtattggtttgaagatgtttaagagatctcaggcatgcatacataagaattaatctaaaagtcatgaaaatagaatgacatgcctaaacgtcctgagctctaagtttagtagaagctattttatactttcctgtgtcatctgtactgagcgtttctagttcttagatctgaagagagaatgaatgggttttctaaacacctcacttcttctgcatctagagagcatccattgcaaaggaattaagagaaggaagcatgttaaatgagcatgtatgttcagtgataagaaaatttggatcccgaaacctccaggcaacgtaagtataagcgtctaaggaggcaatgtgatgtgctcaatgtcaatgtcactcctccagagtaaagcctcctttgggaggcagactctgattagaatcatgagatctaaggatcagaacagaactagcagatcagcctgctatttatgaaagtctcactggcatggtattcaaggaagagtttttaagtaagtttttattgtttgttctagacacttcagtttctgtccacactcaaattatactgccccattagaccatatttccccagctcttctacaaagtagatcaagctttatggagaggcatctccgacttgcagcctaataagaaatccttcttgttaaccaggcttcccaatcaaccccattgtgtcaattgttgtttctcggtaaaatattcccctgaggcaacaactttagaagtcagtgacaggtgggcagaggtccttagtgcctggaagcctaggtattgtgcacagccaagatccaatgcacatttcagccctgtagtttcttccaaagactggtttcacctttcttctggaagaggtcagacttatgctacaattacctcccaattctattagaaacttagtcatcaattcatatggcgccttaaatatttgtcttaatagtaaaatagaaatgggaggacacaatgacagcaatggcatcatgtatctgttagcaagaaaagccacacacgccacaatgattcccaagttatcagtaacaaagactcaatcctttattcaaggaagcagggtctttgcacaggcacctcttcccatgaattctggcagctttgttttatacttccttctgctgtggtctgatgccttgaagcagaatctggtagttcaggctggacttgagctcccgattctcctgcctccacttctggtttgctggaattgtagccgagtgcttctgtgtctgcaacaaacgctcaggatcagggctcaacaagaaagggcgacatttagcttgagttcctagaaagtcttcaggaagctacaaatgacttccaaattacttgagcacccagtcccccagtctacagagcttgtgcctggtggagcagaagctgacgagacctaagatgtgtttccgtctcttttaaaagaacacatttctgttctttcccgctggaggtaactccccagatcctctacagacaatgcgatttcatcctgataaacaagataatttttttttaaatgatcctcttccagaaccattattaagctaagtcaaaagttaactgaagcaaattttactgagattcagaagctggccctggatgtggctcacatccacgaggagtgttgccaaggaaactcgctggagtgtctgcaggatggggtaggagtctccctctctccctttttgtctcaattaatgtttcactatgcctggcttggctggggtgcagtgaacttacagactttcgaagagtaaaatttgagctacgtcatgattgctttggggtctcacctcaggcattagcaatatctgatccctttcatgagactacgagacattcagttcttatttgactgagagactgagtctctcccactagctagctagctgctggtttacagtgagggccacttgccgggaaaacttataaactgacatcaaagaatgtatagtttaactggagagataaaacaattggccttcttgaagttatagactgtcttttgtttaccattgtctctacagggcaatgtgtggcacattgaagggttctgtcatagtttaatgacagacttataagtaaaaataatgcaagaaactgttgcaagagagaaaatgtctatttattactaagcagaggtataaataaagggatctaaaagaattaaattcctttatttaacagattatataagaactggtgatatagatgatgtggctaatttgggttaactctgagctttctagatattgaatgagaggcctgtatataccaaattactcctcctttcatccctgtgacaccaaggactaccttttttttttttttttaaatctctcttgttaaaggctcaaatgatgttggaaaaagggacagaaaagactcacttcaatatactcagtgtcattcgttctttgtagaggtagtcagggaagtcagcaggtgacagggctcccagggggcagactggatcctccaggacagatggcacccctgctgtgaggagtggtgaatcctgaagcacggacttgattactttttccctcatgcacattaggaattcatcagccccttaggagtactggcaaaaaacgattttgtttttctttgaggtcagttttcttggtttgtaattgacaattttattgattttatttttctagttaaaaaaatagcttttaacttttggagcttgtcgctattttttcattgagagtggaaaaataatttcagtgctttacaggaaggctttaacaactgaataatagctttcaagggtcactgtaagaatgcacatccctgagcagagacaacgtggtgtacaggattttgcacagccagttcgtcttctagagtgccctctggcgggcagagtgggtcactgcagatccctctgatcaagatggaaggaagggaaagctagcaaggttagaatgtcagaggtgaatattgcacattggaacgtttcaataacagtaaaaagctgctgtcttgtttaaacaacacatttccttctcatcttgaagacgtttactaaaatagaaggcaggacttagatgaaagctgtgcgaagaggactcgaacaagtcggaaagcaatgaggaagagcaaaaatgagcaaaataaaaagggaaagataggtaaaaacagaagagtgatgaggcgagatatctcattgaccctgatcctccttttcatctcgccattgatttcttctcccacttcctttccgggctctaagttcctaccttagaggataaacctttgagatttatattacatattattatattgtattatattatatattatattatttactttacccattgcaggaaaaagtcatgacatatatatgttctcaacaaaatattctgtcaagcaaaatagcagagtgctgcaaattacccatgatccaactaggcttctgcataattcacgcagagaatggcgtcaaacctgaaggcttatctctaaatccaagccagtttttgggagacagaaattttgcccaattttcttcagaggaaaaaatcatgttcatggcaaggtaacatgccctgtaaatgtatatttgcaatgataaagaccatgaagtgatggggggtgggggctatagttttttagctcaactgaggctggctgtctagatgccgtgacacccaggagatgtaagcatagaacttgtagctaggaatgagatctactgtaacgtgatgaagttcccacaattaccactattaattggctggcttatgaatctatattttgttttatgccattctgtttcaatatctcatatgaaaaccaccacgaactttcaaagataatttgtatattttgtaataaggagggcataggctgccaagttggctcagtcagtgggtaagcaccacacaaactcgactacctaagttcaactcaaggaaactgatgtggagtgattgagccaatttctaaaagtggtccttgacaacacgtgcgtgctgtggcaaacatgccccctctagtagtaatagataaataaaattaaatttaaaaataagaagtgctcaagctcatgaatataatgatacacactataatacacacttcagaaaaaaataaacattcccctaaatatagctcaatagatagtgccagataacagttctttcactgaaacagattgcttgatatgtatagaatttttaagaaatgaaaacctgtttagagacatttgtacaaaagaagttttctgtactatagtcagcaggcatgtattcattctattggcctttaagggaagccaacagtcaagttaacaccttcccctttcttggatgtttctatgcactctattagaagagagatttgtgcagctcttaggacctcatgcctaatgggttccgagggcttttcctaagctaagcgcctgatgctaatgcagcaatcaaagtaatggctcaatcttctcgccagtattcccaaaagctgtggctctttggctgcactaaaatcaggtattcacatgtcatttgtactgctaaataaagttaggcaaactaaaacaaagactagatttaggaggaacatctaggtgttttgttggtggtagaagtcaagactacctacatctacaaacttagagcacaattcatcttaaagagtgatctctacacttacatatgcatacacatataaaagagctaacagttggcttcatagcaacaggccttcagtggagagaatgtttgcaggagacattttctcagctgagaacaggcttccaccaagcctgtatccccctctgttactcacaagtctgctgccctagccctcagtcaaaggagctgttcttgaccgcaagctgaattagtgtcccttcgtctttgggtgtcgcctcttttcctgccctcgtctttcttatttttcttcattgatttatcactatcaaagagagatgacccatttaagcttgcgtctgtctccttaagagaggggaggggaggtcttttctcttacatggcattagctcttcactgtttaaagcataccgtacactctgaaagcatatttgttggataaatgaatggaaatcttgccactgaaaagccatagcgagacacaaaacaaaggggtatatttgtattgttcttctttaattaaaaataatttcacatgcatgcatgcatacataagtttatacctaggttctgtatatgagagaaaacatgcagtttgtctgagcctggcttattcacttaatgacttccagttccatgtattttctggcaaatgtcatgatttcaggaaaggacattttactgggtgatttgagggactgccttaatagttttgctgttcacagaattcaaattatgtttgcttttctgcttcacttactgtttgacttttaatgtctgtatgctctgactgctatataggaatgcttagggagttagttaatagtgtaacgttgtcttagttctaacaacatgatatttttcctacatatttaagctttcttcatgaatactcaagaactcaccccaaccttcctgtctcagtcattctaagaattgctaaaacgtaccaggaaatattggagaagtgttcccagtctggaaatctacctggatgtcaggacaatctggtaggtggtactagaatttgggggataatctgtaaactgcattgatagtagtctttggaaatacagtttgtaggccagtgagtgagaaggctcagtaggtaaaggcgcctgttgtgcgagcctggggacctgagccggatccttgggtaccatgtaaagggagaagaaaaagaactgcactccacagagttggagtaggacccacacatgccctttggcagtgctccccactggataatgaaaaaaaattaaacatactagttaagtagtaattagctagttatacttagctagttataaactagtagtctcaaaattaatgagttatcctaactagcaaccaatggcttatgtaagaaataaaaatgttagttaaaagcattatggtgaatagaatagagatgctattcacctttgccagcttcaggaaggcaaaatctcctgtccagtggctatatcctcaagagttcatttgttttcattcttaaaagtcacgcattatcatcttcaatatttcataaaggcttctaagattggttttataatataataagatcctggcatatagaaaattgtgtgtctgagacgaaagaataatgcatgtaataatgtcggtatttttaggaagaagaattgcagaaacacatcgaggagagccaggcactgtccaagcaaagctgcgctctctaccagaccttaggagactacaaattacaaaatctgtatgttttttttgaaatgttttcagtaaattaaaattattaataggtgaaggaagcataaatttaaagtctcaaggcaccaggcactgctactctttcttctattcccaattggatcaaagtcagtataaatgtgactacgtgatttctccaaagttatcccccattaaatattaacaagaacagcccatgaagtctgatgttttaaattgacttcgggttccccaaaccctgtagatttttgcagaagagctatccattctgctcttgatctgtcaaggttccaacacccaaagtacacggttgaaatcaaggaagagctaaggttgggaggaaagcagtcttcttcccacgtagtgacacgtgagagagatggaggtggggtatgtggagtgattggcagaataaacacttctcattgtggggccacatgactcatgccttctgacaccggaagtaggtcctagagaaggaggaaggggtgaacactcacgatgacgaggtaaaaatgtttcttcaaggttccttattggttacacgaggaaagcccctcagctgacctcagcagagctgatcgacctcaccgggaagatggtgagcattgcctccacgtgctgccagctcagcgaggagaaatggtccggctgtggtgagggaatggtgagtggagaactgtgtggaggtggtgttccttggtttcttcagtaagttcaggtggagggtgtgtgggagacctgtctctcagtggtttgcctttggccaggcgttctgtccttctcaaatggttaggggcaaacacagagggattattcaacaatgtaaaggcaaactttatacataggaagaataacacccaacatattatccaacttattgcttcttattctctaaattctcactcttatattggaaagtaaaagaaaaaaaaaagaaaaattcacttctaagagattgcaattagtcatcttattttagccacacttaagagttctgcattttgcagaccagtcgaatcattatagtgctatttggggtagtttgttcccaagcaaagtacaggagtaagattcgtgctctggatagtcacccccttaatcttcacgtcacactgagaggggagcttctgccactaagcttgaactgtttgcatttgacatttgagaataaaaaaaaaaataccaatttgtagagtgacttgtcttagattagggaatccaaggatgcacccagtcatagctcgagagtcgtaagctcacaagcaccacaacaatcattaagatttataacttggtgtttataacttggttatctttgaagtatgggggattgggaggatctatatgaaaaggatctatatgaaagctttaagcacacacacatttattttctactagttttgtgtgtgtgtatacgtgtatatatagaaagttgcaaaggtagattttccctattctagctttcagaaaggagttctctgtatcaaaatgcaaatgcaggggttgaagggatggcttaggcagttaaaagaatgtcctgctcttgttgaggaccggagtttggaccttcgcacccactgaaaatgtctctcaaacacctattactccagttccatagagaggtgatgtctctggcttccacaggtacccaactctcatctgtacataccagcccctagttatacataatttaaaataacatagatatttaaacaaaagcaaaactcaaccagatacacacagaaaatgagctcaaaaaattgatttctactcataaagatggaaatggtttttcccttttgaaagtctgtctacaatcagaagcatatttcaaaaagctaaaggtcttttcacaacaccacatctgccaacatctatcattacacactaagttttatcccaagcaaatgggtaaacagcacagtccttaacaaatcgttactaaggtgatagtacagcatagaaaagtttcccgtagcattagtgataagctcctagactttgggagccaccgcatgaaatttctgaaaacgtgagccaacttcggtggctaattttgtctgcctgcttccttctttttcattctttttaaccaggccgacattttcattggacatttgtgtataaggaatgaagcaagccctgtgaactctggtatcagccactgctgcaactcttcgtattccaacaggaggctatgcatcaccagttttctgagggatgaaacctatgcccctcccccattctctgaggataaattcatcttccacaaggatctgtgccaagctcagggcaaagccctacagaccatgaaacaagagtaagacattgttattttgagctgagactcctgccttacatgttgagaacttctgggttcagtagaacattgctgcccttgaaatactcaacactatctttaaaattagttctgtttcagtttttacacagccttatgtgggaagttagtttgaaaaaaatccacggaggcagacaattttctggttatgaaaaattctctctgtcataacaattgcaatatatttgtgagtaggaggaaaatggacaatatatttagaaaaattagaaaagatctttgtagtgagtcaggatacttctaatgataggaaatgagtgattgcatctataagcagtataattatacctgactcaactatgttgttgttttaaaaaaaggaaataaacacacattcgcgaggggagacattctgtaatggtaatggggtgaagccaggggaacttatattcttaaatatccatgtattttaatttaaatgaaatgctcactggctttgtacatgagcttcctgcattgggagatctattctcccagttttcttcaccccaggcagaggcgagtttcaagagataataagaatggtacttcctttcccaagcttgcttatggccttgccaaatttaaacccaacacatgatcaccgatcaccgctaagagagtattacaggcagccagtgctccttcggttaagctatgatgctggcgggtgtcagcatcttgacatctgggcttgtgggtatgcctaaccgcactgcagaggagccaagaggcaaggataatgtaggtaatcaagacagagagcacagttccctctccataaaggcacacagagtcctgacatagtgattcctctgtaacctgcaccagggcaggccagcggcgtggtgtgcttcaggctgagaagtgtaagggctaaccttggcacggagcggaaggagaggcagctgaggatggctgctagggttctgaaaacgctctactaaacgttctgggaaggtgcggctttctttgcatggcagactcgcctgtattttcttttgttctaaaccccaggcttctcattaacctggtgaagcaaaagcctgaactgacagaggagcagctggcggctgtcactgcagatttctcgggccttttggagaagtgctgcaaagcccaggaccaggaagtctgtttcacagaagaggtgtgtatgaacatctcattccctaaagtctcggtgtggtgcatcctgcagtaaagaacagaaatacggtcctacaaatccgaaacttaaaataatgaccaatttatttatttatttatttgaaaatcttatggggtttaaaaactaatatttttctaagtactagagagaattaaaaatttattctatattaagagaatcagtaatttttatttatttcctaataggataattaaatatataaggaattaatggtaacatagactgtttctgagctaaagttaattgattttcatgaagtggattaaaggaattcactagttagtgtgtattgattaaatgatcaagatatttgaagaatatttgtaggaaatactcctgacctcacttaagagcgagcacactgacagtggggataagaaaatgtctgagttgctgtctgactggcacagtcctctgtctctttatctcagcatctgtgtatgttcttcacttccagggtccaaagttgatttccaaaactcgtgatgctttgggcgtttaaacatctccaggtaagaaaaaaatgcagcccaggctcaaatgttgattctctcgatcaatcaatatagtgatgattctaagaagtatcatcaatattccttaaaatgaatataatgtaataaagaagaaggtttatttttaagtcactaaaaattttggggagatttaagaagcttcagaaaatgccatcagaaggttttctacttaattagtaatataaactattttctttttatattgcagaaggaagagtggacaaaaaaatgtgttgactctttggtgtgagccttttggcttaactgtaactgctagtactttaaccacatggtgaagatgtccatgtgagatttctataccttaggaataaaaacttttcaactatttctcttctcctagtctgctttttttttattaaaaaatacttttttccattt

SEQ ID NO: 89 - DNA, 17377 bp, Pan troglodytes
aacctgcataaggattgctttgagtcaatccatgagcactgtagtcttgggttttagaccttgatcctactgggaatagacactgttagaggtctgtctaattaccaatttttttttgcttaaatttaaaagtaaccataaagaatatagatatcctcaattatgggtacattacagtagatggatggtcacagaaggagaaaccacgcttatgggaaatccacttattttagcctttaacatctatatgtatatttatggcaaaagaaaacaagaaaaagactaaagtttcttctcggatgacctggaagctaattttacataattttacaaatcaaatgtctaaacagattacaatataaatagaaaacaaagcaaacaaatgaaaaactatacttgagaaaaataagcttgctacaggtctgttccttaaggattcacacgtatttttgtttcagggctaccatattttttgcccagtttgttcaagaagccacttacaaggaagtaagcaaaatggtgaaagatgcattgactgcaattgagaaacccactggagatgaacagtctgcagggtgtttagaaaaccaggtgagtgaataattttaaaaaagcattgtgatatttgacaaaaatttagcatgctgaagagaagatacaaaaatagcagtgaaaaatgcatttaaatatttgaagagctattgtatgaaagagggattagattcattctgaattgctaaagagggcagaagagaacaataggtagttattataaagagaccatataaatatgatgactaagagctaaggttctgaaataagattatcttgatgactatgggcatattaacttttttgagcttcagttttcttatctataaaataagggatgataatagctcccatttcatagttagcatggaaattgatataacagcaatagtagctaacttttattatacacacaatgtgactggcattattctagggagcataatgtgtatattgataataaaaatattttatgacataggggatagatagcactgatgaatcagaatggttgtccagtgagtcaagagatgctggctggggcttctgggcaggatatcaactttgcttacctatatttatttattaaacatttaaaataatccttgaagatatatgctaatcttccaattgaggaagctgaggctcagagaatttaagtaactttcttaagggaaccaccaaatggcagagccaggatttgaactagagcatctggcttaaaattgacagtcttagtagcttcattacactataaccatagtgcatgtaagatgcatagcacatcgttagggttgccaggtttagcaaacaacaacaaaacataatacccagttcaatctgaattttagataaacactaaacacttttcttagtataaggatatttcattgtagatgctcaacaaataatatttattatttattttatctcaacatagaaacaaacttgataatgattagaactctccaattacaaaacaacatgcccagagaatactctgttacggtggggttaattaggtggctgaaagacaatgtacctggaatatcatagaagagatgctcctttaaggatatagtttaagttctttccaactttgaaatttatgaattgacaaaaatttctgttttgcatctctatttttgtcttgttctgataatcttttcaaaatgtgtataaaaaccaagaatacattatctattgcaaattaacaaccaattagacgttcaaggtaatgttacagatcgctgatttattcttgtaaattcaaaggtatgtcttttaaatgaggattgggaattagaaatcttatgtaagctttccaggattctctaaatattactgtagcagctataaaagctacataaaagttccctcagatacatgaaacacatgtattcctcggatgctttctgtggaatattgatgctgtcatctgagtttggtaagagtaagtcacagaggaggaaacacatatattttaaaacattttagctaaatatgtaattgtggccaagaaaagtgtttttttaaaaaagaattatttcatttcaaaatcatttttatttataattgaaaataatgtgcagttttttattgtcttgtaaggatggcatgtaaaatgagcatttatgtctgaaatgtggtatgtctgtgtgtgtgtgtgtatatatatatatgtatgtatataccataatatatacatatgtatttgcaattccaaaagttacatctttaatgagaatcatgaaaatattattttgctcagtttctttttttatttaaatttaaatttaaagttctggtgtacacgggcaggatgagcaggtttgttacataggtaaatacgtggcatggttggttgcttcacctaccaacctgttgcctgggtattaagcccagcgtgcattacctatttttcctaatgctctccctccctgcactccactccctgacaggccccagtgtgtgctgtttccctccctgtgtccatgaaacatggtttatatatttataaaagtttatatatcctagtccaaatttttgataacacaaaaaggaaaaataaaataattcaaaattgggaaagagaaacaaaagattgcatggcttttttccttttattgtttggacattaaagtctcattttccataaggcagcaaagaaatctatttcatcgggctgaaacaaaatacattagaatttgtatggaaaatttttcagaatctatagttctgatcttaaacattagaaaatgtttcatgtgtcttatagatttttaaagcaaagttagttgtctttcaccaaacataaaatatttcttatagctacctgcctttctggaagaactttgccgtgagaaagaaattttggagaagtacggacattcagactgctgcagccaaagtgaagagggaagacataactgttttcttgcacacaaaaagcccactccagcatccatcccacttttccaagttccagaacctgtcacaagctgtgaagcatatgaagaagacagggagacattcatgaacaagtaaggatccagtttaaaggtagatgcaaacctcagaaacacagcaatggcaagcctaatttagtatttttgcaatgtactcatgtactcccagtaagaggtataatgtttctttggtgttgtgtctgctgaggtcccaggcaaggtaattaggagagcaacattcaatgtaacttggtttccatagcacgctagatgtagtacaaaccacaggacaaacctaccagaggttccattagtcccttgagagatatacaccttttttttttctttttacccattctactctcaattttaccttgttcaagaatatattagtattgcaccaaattgatgctttccagagccatatattggtgttttgtgttcacctaattgcctagaaataaaagttagagatccaagcatggtcaagcatggtcaagatacacagacatggcaaaggtttactgaacacttacttaggatgttgtggaaacatgtctgcttgcacagaggatcagattaacactcacaaacaaactttgaagcctccttctcctcttcctcttcattcttcttctttcccccattttgttgataggaaattgaaggttggaaggctaaaacaactggctaagggcacacagctagtacatttgaccccaggttctctgttggagaagcctgtatgtaactcttcagcacttctgccttccatgttacttcctaaaccaggttaatagagagattgcccttagaacatctctgctatggcgactatccaggtgcataaccccattctgcactgacaagggataaaatgtccatctttctgttgcacttagcagaagtctggctttgctaatccctgaaacatatctgagtaggcttattgaaaaggaccttttaataagaatcatggttagcatgtctgcctattttcttctcataatagaatccggtaccatctctcagatatttttccccccaggatctttagtgaggaaaattttgacaacatgtggaaaaaatatgatgattttccccttaggaacacagtaaagacagagtcaaatgcattttgttgttgttgttatttgaatctttaaataaatcccagtgtccagttccaagcagtagtagtcctatttttaggtgtttataaatcttctagctctattttatttcacagattcatttatgagatagcaagaaggcatcccttcctgtatgcacctacaattcttctttgggctgctcgctatgacaaaataattccatcttgctgcaaagctgaaaatgcagttgaatgcttccaaacaaaggtatcatatttgcgtggatatctgaaccagtactgtagtctatgactcattaaaacaaaacaaagttaaaaatgaaaacgtgcttaattgtggagagtatcgtttttggaatagagaaatagctcagcagtctgatattcttcgagtgaacaaaactggatttgctggtttttattatctattcattaagtcaacaataattttattattaaggaagtgagtttgatgggataaagaaggaaagacagacagaaagagagaaagagagggtgctataaatgggaaggagtaagtgaaagaaaacggagaaaaggaggagcagaggagagagaaaaaatgaagaactatgataaatgctttatactcactgtttttttaaaccttagaacaaatttgaggtgtaagtatttttgtcctttaacaaactaggaaagaggtttagagaagaaatttttttttaggtttagagaggtagaataatatccaccattaactacttgctaccagcagtcctataacaaaaatttcctaagaactgactactctcagtgtcaagccgtgatacaattgtattttttgtaactgagaagacatttaagaaactagcaggcttcaatttgtctttaagctgtttaaaagtacagttgttcatttatgatccccagtataaaagttatgtttttgtttcaaggtactttgagtaaatttatctggcatagatgcatataaactaacccaaaagaataaatgagtcaataatattctgcgataatgtatgacatttataatttttagtaaaaaacatattttatggaatttcattttacctatacttgttgttttcctaaatattagagcttgtaaagaaaatgttagtatatgctttcatgacattttgtttcctctacatctaggcagcaacagttacaaaagaattaagagaaagcagcttgttaaatcaacatgcatgtgcagtaatgaaaaattttgggacccgaactttccaagccatgtaagttcaagctctatctagggaaggcggtgagagctacagaactaccattttgcaatttgggttcgttgttttaattgttgctgttttagagaatgaagacccctttgtgacctctttgatgagggctaatgggattacaaccatgaactcttaggatcagaaggaagctaacggataagtcagtttaacacttaccaaagcctagctgagataatacatagaaaagacttttaaagtttatgttatttacctgttctttaagacacttaagttctggtctgccatcaaattatacctcatcactagaccatatttttctagctcttctacaaaataagtcagccttcactgagtgtcatttaaaacttttgccttaacaagaaattctttatattaattgtgtttcttaatcttctgtaaggctctttatagcatttattgcttcccataaaaatattcctttgaggcaataatattagaatctagtgtcaggagaaaagaacattttaaattatataacttatttaaagtactcatcaactcttttatgataaaacatttctagtatatgaaaatatctgagctgctaatcgaatagtagtaagtatatatattcagagtttatttgattgctgtttggttaaataacacgttaaagcatactgtagacaatggaaatctagaatgaagtttttagtaatggaattagttctaaaggctgaaatttcttcttgtaagaagtcagatttatgccttaactaccctccaactcagttagaaattgaaagattaatttatgacctacttttaaaaaatttatcttagtaataaaatagaaattgagatagtattataatacccttatcatttgctatccataagtgaaagctaagtggtctaaatttatagagaagatccatctttatcagaagcaggagtaacactattttctctaggagcaatggttttacaaagacaactcttaaaatttaatgaagtatgcagaggaaaccagaatttttatttcttacttcttttttggccacattactctcttggcacactggtatgcctgaaatgtttaatctgctccactttcttgtcccatttcattgatttgcacatacgcctcctttcctggattctcagaagtattttttaccccagtaaaaaatggttctcattttcatggaattttccatttcttaattgtttatccttttaaagttttatgtccactcaatacaaatgctcagcatcagggttgaatggcaaaaataatttaccttaattcttaagacatgttttgggaaaagataaattatttctaaaccatttgtggggccagctcacagtttacagagctaccaccttgaaagttacggctggaatcaagccttaaaacatgtttccttttctttttaaacaacaagggaatttcagtcatttctctttgaaacttctactgtagtaatactctataaattctattttattttgacagataaccaagaaattaatttctaatttcttttttttccctagaactgttactaaactgagtcagaagtttaccaaagttaattttactgaaatccagaaactagtcctggacgtggcccatgtacatgagcactgttgcagaggagatgtgctggattgtctgcaggatggggtgaagagtcttgcttcttaaaaaagatgattttcactcccttttctttctttttgtctcattctaaaagggagaaggttgtttgacttgaattggttacagagtatgtaaactaggtgattccttaaatttgcagaattctcgatagcaaaacttaaaccatcttttgttgatcctggctttcactttagctatacccctttttgtgaaacaaaggcccatctatttcttacttctaaaaaaaccatgggaacttctcagaaggcttctccatagttacttggaggacgggaggaaactaagttttaatgtatttattttttcattcatttattctttcatttgacaaataaatatatattaaatactttctatctgctagccactatgacagacacttgttgtaaaagcacaggctgacctcgaggaattcacagtctgataggagagataagacagtgacctccttggagttagggactgccttggtttactgttatctccatagcacaatgcctggcacatggaaggcattctataatagtttgttaaatgaacgaatacaataaaaatagcagaagtaactgtcctaccaggtaaaaagctagccatgccaaagacaagtgtgaataaagtggtctcggagaattagaaaacaaaatttaaaaaacccagcaacagtttcttgagtgtgctctagtcagtggtgacttaagcagtgtggcattggcttattttagctaaccctagacttcctagattttacaagagaggactgttgaccctcagattactctgtctctgtgggccccatgacacaccaaagagattaaaatccaaggagcttaaaaattactgctcttaggtactcaaatggcttgataaccagcacgggactatggtttccagaaggctgaaagtgaagataaaatgctcatttcagcccactccgatggcaattcagtgagatgcttgaagtaagcaagaagccgaggctgcaggggaggcctgagagtgacagtccctgaggagctggggaagaagtgggaggaggcagcctggcaggcgactgtactactttacttgtttttcttctagaagtatcgcatcctgggaaaaccaacaagaagtattttgtttttctttgagctcagttttcccattttgaacggacaattttactgtttctcgttgtcattttaaaaaagttagttttttcaatttttggagctcataaccacccttttcctttaaagtggaaacattaatttcagcatgatatgtaagttggattttgatagctgaataatgggttctaattatctttgctgagaatgtacagaattttcagtcccatgacaggtatatatgtaagctctgcctctctctggccacttaggtgcattgccattttattatctatagactgccctctgaaggtcatagtcagtcactgcagtatgttctgatgatgattatcattcttacggaatttctcatggagcagaaagtttgctctccatgttatgataccagttgcaagtgttgtttaggggcaaatttgaatgctaatagaaatatatatagcaacatgcatcctattttatttgagcacatttccctcttatttgtaaaggttttcaattaaaataacatagggtttagcttacaactatggaaagaagaaatgaacaaacaggtaagtggaaaggaatgagaaaaggcaaaagtggggagaaggcactaaaacgggagacaagttaaaatgtcttctttcttcttctttccttcctccttcccccatccctctctacttccctttccccttccttctttcctggccttttttctttctttctttgttcccttctccctccctcccctttcttcctttttctaaagctggctttgagatcctttattaaagaataaatctttaaaacttatactttattttccctgttgcaggaaaaaattatgtcctacatatgttctcaacaagacactctgtcaaacaaaataacagaatgctgcaaactgaccacgctggaacgtggtcaatgtataattcatgcagaaaatgatgaaaaacctgaaggtctatctccaaatctaaacaggtttttaggagatagagattttaaccaattttcttcaggggaaaaaaatatcttcttggcaaggtaacacactctgtaaatgcacgtccatacaagtaaaaatggttatgtggctgacagatttgcgttgttgaaatggagagtgatgattatggtttttgagttcaatatgtgaggatatttggctagaatgttctgagccaaaatagatttcagtagataaccagggaataagtaatgggatttggtgtttaacggtgaagcgttcaccactgtgactcattaactgctttgcttatgaagctgaattttatttcacatcaatttctctggaatcagaagcattgtcatcctgtaaagattactcatatcaaggccaccattggactctcaaataggatatggatatttttgtaataagaagagttcatgattaagaatgaactcttgctacgcatgttaaaaaaaaaacttttctccaaaagataacacaatagataatgctagatagaagacctttcataggaacagcttattggctatgtattaaatacatgttttatattttttaagaaaatcaaaacatgtttagagacatttgcagtacagtagtttgttttaatacaattcataggtcacgttctcactctatttgcctttaagggaagaaagcaatcaagttaatacgttttccttcattgtatagtatgtaactatggacactattagaggagggatttgtgcagcacttaggacattatacttgataatttccaagggtctttctagatttaaaagtctgattctaacgtagtaataaaaataaaggcccaattttctctttaatattgcctgaagatattactctattattgcattaaaattaaacattcacacattgtttgcactgctaaataaaattatgtaagctagaataaagttcagatttaggagacacatagtgacaactgattggtgacagaactaatcctataatctgggaatacggttagtaaagtcaagaattacctttaagtttacacatccatgcacatctaaatctaattgtttaatagaagcagttcttcagttgcaaaggttctttgcagtagaattttctcagccaggaatgatcttcccccagatacttgcatggcttctttcactcagctgatctctgttctgatatcagctgcctagagagaattttcttgaccacacacaaagttagtggtctctccaccttgggtatcatccttttttctctttttcatctttatttattttcattgatttattgctaactgaaatgagatggcctatttcttgtttatttgttctgcctccctataatgtgtgcttttcagagggcaggtatttatcttacacatcattgagtccgttctgcttaaagcaatgctagcaaagagtaaacactggaaaaatatttgttgaataaatgaatataaagtccgtaattgaaaagtcaaattgagagatgcaggagaaaacaaaaagccattttacaggacaatttgaaggatcacagtctgtattaacagttttgccattcatataattcaaatcatatttgattttcaggtttatttatttgaatttaacttccacatgccatattatataggaataactggagaagtgatggctccttttgtctcttagttccaataacttgaaatatttttctccacatatttcagttttgttcatgaatattcaagaagacatcctcagcttgctgtctcagtaattctaagagttgctaaaggataccaggagttattggagaagtgtttccagactgaaaaccctcttgaatgccaagataaaggagtaagttgctctagaattttaggggagtatgaaaaactagattgatatcatctgttaaaaatgctgtttgtttgaaagcctctagttgttaactagttgttagctagttatatatattaactggttgtctagatattacgctgttattaactagcagccagcagctagtggcttgctttagaaataaaaatgttaatcgcttctcagccttttggctaagatcaagtgtagaaataaaaatgttaaccaaaagttctttgatccacaaataaaggtagtattcattattcatttttggataacttcagaaaggcaagaatttggtacagaaagaactgtaaccatttatccaaagattgagttttgccattaaatgattttgtgattcataaagtgttaaacttaatctccccaaaatccattttctttaattatcaaaatttacactttaccatatttaatattaaaaaatctctgattggttttataatagtatataatattgatcaattttatatacaaagttatgcatccaagaaaagaaaaatgtatatgtaataattcttcattttcaggaagaagaattacagaaatacatccaggagagccaagcattggcaaagcgaagctgcggcctcttccagaaactaggagaatattacttacaaaatgcgtatgtttttgtaaacagtatttttagtgaattaaaattattaaagagaatgtagtcttccccattctcctcctttggaagcaacaagaatgacctgtgaggtctgatctgtggtattgactttaagttccccatactgtgcaaatttttgcagtaaagatatccattctgtcatagtctgtcctagttaaagcaccaaaagatcacagttaaaatcaatgaagctccgaggttgagaatacaagtcaggcttctgcctggagtttgctttttcattgtgatatgcttctataatagcagtacagggagtggttgttagagtaaatgcatctcaaaagttggttcaaataccatgtagatgaaacaaatgagctgacctcatgtcttctggcatgagagaagagagtctgtgagaagaagcaaggcggctaaaaactcatgaatgactcagcaggacttagttaaaaaatgcttctttcaggtttctcgttgcttacacaaagaaagccccccagctgacctcatcggagctgatggccatcaccagaaaaatggcagccacagcagccacttgttgccaactcagtgaggacaaactattggcctgtggcgagggagcggtgagtgtctgcttggtttagtcccatctcatttctgccctgtttgacttgaaatagcctcataattcccctctagggaagacggtaaaaaccaatgtagagatggccttaggaggcttgtttgattattcacggttggaggggtgtgagaacccagctctggatggctggcatgtggctatgcttcctattcctccagggtggctggtggaagtgcagccagtttagtcaacaacatctgagccaactttatatatcggaaagacagaatgaccaacatgtaactcataattcataacaattcataattcataacttcaaatcataatttctgctttttgttcacattcttactttgatgttttaaaaaagctttatctttgattgattaaaattagtcatgctattttagccatatttatattttcaccttttgtagtataatattattattatgacatcaggaataatttgttccctttctcagggtatagggtacagtgcaggataagtattatgttctgaatagtaaaatgactttcgagtcagtaatgccagtattctttacttcctaatgtcactagtatcatacataagattacaggatgaattaaaaatatttttccgataaagtcataattgcaaatgaaattgtctaactattttatcccttttcctctttttcataatggggagttatttgctgttagtcttcatgtcgtaaatttttcccccaaaggttaagagtaaagggagagttcttgtgattaaatgtcacctcaattgtttgttgaattccccatgctgggaggctgcagggatgcaggatggtgtaatggttcaggagtgtatgttccggaggccaccagccaacaaccgcattctactttcactattctttagttgtatcacagtgggagagcaacttatgtcattaagcttgagttttttcatctgacatttgagaatacaaattataccaccgtcatacgacagctgttttaaacaagataatctgcataactcacacagcactagtctgacagataaagtgcacacaaaacatattatttcttattacaagttattactaggtgattaagaaatatctcctaagtaggcaaggtagcaagattctacattaggaaagtcttaaaatcccacaaaattggttctacttcttttcaattaggatgatatattagctgcaagtgtatacatgtgtatatgtatgtgaataaaaggggtaagtttgtgctattcttaccttcagatagtgattatcaaaagaaaaatggaaagttcaactaaatacacatgggaaacataaaggcagagacatttttgtcctttagaagtgtgtatgtaactggaagcatgtttcaaatagctgacacaaatagctaaatgactatcctcaacatcacatatggaccatctgctactacatgctaaggcttagcccaaacaatgggtaaatcctggaatttacaatataatgtcacatgatcctacatagcaaattttcctgtaatattaattataaattgctgggcattagaaattattgcagcagttttctgaaaaactgaaccaactttgtgactaatgcccaatctccttacttttttttctcattctcctaaccaggctgacattattattggacacttatgtatcagacatgaaacgactccagtaaaccctggtgttggccagtgctgcacttcttcatatgccaacaggaggccatgcttcagcagcttggtggtggatgaaacatatgtccctcctgcattctctgatgacaagttcattttccataaggatctgtgccaagctcagggtgtagcgctgcaaacgatgaagcaagagtaagaaactgttacttgctagcatggaaaagaatgacaaccccaaagagtaactgagacttctacctcgctcacctaacactattggcctcactaacagagcgttactcccaaagcacttaaaatgcctttgaaaatagttttgtctcagtgtcttcacagtctcattggggaagcaggtctagaaaaattgacgagggtgggcaatttcctgtttgtaaaaataatctctgttgtaactgttattgtgatatgtatttgggggttgaggaaaagtgggcaatctattctgaggaattagagtgtatctttgcagcaaatttgggtacttccattccaagcaaaggaaacacatcactgaatctttttttacactatttacactttgaagagaataaccatcttatttaattcaaccatgcagtttgggtgttaagaaatgacatgtacatttcagttcattgtgggagctcttttgtaatggtgatggtcatgcaagtcaatggagcttatgttcttcaaactcccatgcattttaatcctcacttgttttgtaaatagtcttccttcattggaaaacccattcttctcttttttcctctatcacagtctgaggtatgtttcacggtatgataagaatgttgccccttctggcaagctttttctcttgctctggtctaagtccaacatgaaaggcttgctaaatgagcagtgcaggcaattagtgctgccagtgcccagataaggggtgtgataactggatgggcaggattcggagatctgggtctttgagtgtagataagacacagttaagaagagaggacaggaaaggatattcctgggggatggtgggagattgccttccactacacataagtatggtcaagtatgaaatagtgttttatccacaacctgcacaactccaggctggtggaacacttggcatgttttcagcctcagtctttctactgaaagtactagaaaaggtgtgtgtggtcagtctggtgataggttgatggagtaagggtttaggctctgtaaattctctactaggaaggctgtagaaaaatagcattgcataacagacttctcttgtattttgttttgttttaaatcacaggtttctcattaaccttgtgaagcaaaagccacaaataacagaggaacaacttgaggctgtcattgcagatttctcaggcctgttggagaaatgctgccaaggccaggaacaggaagtctgctttgctgaagaggtacacgcagctcatttcatactcaaaatacttactatggaattttctgtagtggataatgaaaggaagaccctacaaatttataactttaaaatattttcagagatatttaaatttcattgagaagcagattgaaggattctataagatttaaaaaataatcacattttcttacttaatattaggaagaattataatattaaaatatattaatagaattagtaattttaatttatttcctagtagagaaacccataaagtgaatgtataaataattgatggtaatttagatagtttctggcctaaaattgatcaattcagctaaatggattaaaggatttaatagcaaattaattatgcaaacagagtattaggagtctatttgtagaaaatgtttttgaactcatttagaagcttgcttttgtacatcaacagagtagtacttaggagttgttttaattacatagtaattttagctggataattagccagattttctttaaccaggggattctacctaacatttaaaaaaattaccttctttcagctttattgaggcatgattgacaaatacaaattatatatgtttagggtgaacatgtgatgtttcaatatatttatacattgtgaaatgattatcacaatcaagataattggctaaattttacaaatctttagtttgtattgctacatatatttcaatatagcaacactatactttaaaaagatattctataacttagcgtttttgtcaattttacctttctcaccatgtaaaatgcaaagacagatatatttagaaatgtagagattttctataaataatataattagatgcatttgagtgtgtgcacttaccagtatatatgtgtgtttttggtgggatcaggtagggtgggacatagataaccaaattagataaaactcgtgaaacagatttgatgtgaagcatttctgaaaaacatgacacaagaagattaatgttctctaatctgagaagacatttatttagatatagagaacataaacaaatagtagcagtgctttatctgcaaaccttttaatttctaataacttgtaatttgtagaggaaggggaaagattgagtgagaataggcattgatttggagattgttatagaagaaaactgttgatgtgaaagaatattgttttctccctggcttttactatcccaggttgttggcatcagagatgtgtttcttcatttttaacttagttaatctacaaacctatgaattcaccctggattgtagagtgttaactgtataattggtataataatccatttctttatctgattatgtttattcttaattttcagggacaaaaactgatttcaaaaactcgtgctgctttgggagtttaaattacttcaggtaacaaaacattcagacaagcctgaatacaatgttgtttctccagaaatatcaatccataatgagatagatcatgaggagtgccattaattctcttaaaagtacgtggaattttaaaaaaagtttattttaaaaacacttgaacaaaattatgcacacaatgttaaattagtggctcaactatgcaaaatcctttttggttatttaaaagacttcaacaaatgctatcagaagactttcctatgtatccaatatttctctgatataaaataatagaaccagttacttactgcacctattagtttaattagtatttaatatatttttgctcatattgcaggggaagagaagacaaaacgagtctttcattcggtgtgaacttttctctttaattttaactgatttaacactttctgtgaattaatgaaatgataaagacttttatgtgagatttccttatcacagaaataaaatatctccaaatgtttcctttt

SEQ ID NO: 90 - DNA, 8635 bp, Human
gctactcccaccccgccccgccccgtcattgtccccgtcggtctcttttctcttccgtcctaaaagctctgcgagccgctcccttctcccggtgccccgcgtctgtccatcctcagtgggtcagacgagcaggatggagggctgcatgggggaggagtcgtttcagatgtgggagctcaatcggcgcctggaggcctacctggcccgggtcaaggcgctggaggagcagaatgagctgctcagcgcggagctcggggggctccgggcacaatccgcggacacctcctggcgggcgcatgccgacgacgagctggcggccctgcgggccctcgttgaccaacgctggcgggagaagcacgcggccgaggtggcgcgcgacaacctggctgaagagctggagggcgtggcaggccgatgccagcagctgcggctggcccgggagcggacgacggaggaggtagcccgcaaccggcgcgccgtcgaggcagagaaatgcgcccgggcctggctgagtagccaggtggcagagctggagcgcgagctagaggctctacgcgtggcgcacgaggaggagcgcgtcggcctgaacgcgcaggctgcctgtgccccccgctgccccgcgccgccccgcgggcctcccgcgccggccccggaggtagaggagctggcaaggcgactgggcgaggcgtggcgcggggcagtgcgcggctaccaggagcgcgtggcacacatggagacgtcgctgggccaggcccgcgagcggctgggccgggcggtgcagggtgcccgcgagggccgcctggagctgcagcagctccaggctgagcgcggaggcctcctggagcgcagggcagcgttggaacagaggttggagggccgctggcaggagcggctgcgggctactgaaaagttccaggtgaggaggttgagggcctgggtgagagaaagtcccagaaagctccagaaagtcccttatgaagctcagagaccttctgggaagggagtggggctagctggctgctgaatcaggagccagttctcagaaacctggtgccacaagtcctagacttttacagcccgtctagtgtaggatgcgaatggtggggcttctcgaagcacatcccgggtgggcagtcaggcccaagacccgttgcagcagccccgccactctctggatggcaccttctggctctgatgatgaccggggctccgggtcccttcccaggctctggtattactaggaggacacccagcactgtcgcctctgcgctgaatctggtggcctggccactcagaatcaccaagttcctcacagccctccttctcctgaggggaggagtgaggggccgtgaatgaatggctaccagccccctcccatgtcatggcttctcggctccctggagcacattccagaggcccataacagctgctccttctcacagggcacagatgtgaccagcagctgagaaaacagcttcttgcctgggccacacagaggtgccatggccacctccccatccctcctctcagaggagacagaatccagaacatgtgggaaatgggggtggggcgggggtgagagcctgctgtgaggagcaggagacagttgtgggagatgggaccaacgggggacgggggctgtttgccttccagtcctgcaggctccaggcatcttgattaatcgtttttccttctgctttcgcttttttttccccctcttctctctccataacccatctcgtctcctccctcacctccccttcctgtgggagctgtgttctgagcaacatgtgctaccatttaatcagcatcctcagaggaggagcaggccatgggagagagctgagagtgctgacaggggccctgggctcatcttggctgatccagagggggctctctgggcagggaatagggtaggggaggcgggggtctgctacacagataagtcagccagggagcaggaggtgcttcccgggcagcggcagcgggcaggaggcaggttggttcacagaagggaccccagcccctccactgactgcctctcgcctgccctgcagctggctgtggaggccctggagcaggagaaacagggcctacagagccagatcgctcaggtcctggaaggtcggcagcagctggcgcacctcaagatgtccctcagcctggaggtggccacgtacaggtacgagacgagccctgtccacccaggcacacagaggcacacacacatgctggggcagactacgtggctgaaggggaccagaggtgtaggtgatggcaactctgctgccactgggttctgtgactctaggctggtcacttccacaccggaacatgtcctgcctgaaaccgtctgctcccccataggctggagacctgagcaatgtcctgtgcccaggaaatccccccaggagagatgatattgccgagcgggacagcctctggagaggggctgggcccgtgtggggcaactgcatccagacccttcccccaaggggcaaagctccaactctatgtgtgcccgcacccagggggtcatgtcctttggcagccacggaaaggaggcattgcaggcatggggtggctgcactgacttgccacctgacctgggcctcagcctcgtctaggggctgagggctgggctgggggacttccaaggcctcttctagcctggatgtcatggggcgagactcctctgatgcccctagtgcccttggtcctgcccagcctttcattgtccacattttctgttatcctagaaatggctgagaccaaggaggggtggcttctcacttgctatgtggccttgggcaaagcccgcagtctcttctgggaaactggtcctgttggctgaggggccattgatggggcctgaggaaggggctctgtggctggtgaggggccacatgagatccaggaaaggaggagaggcaaggcccagagatggaaggtcagtgaggctctggggaggacgtggaggagaggggctccaccgccagggaagagaagcccagaaggaaggccgcagcactggcaaggacagaggtgaggctacagcgagtgctaaccagactcagagatcatggagcaaagcagagaggagcagctgctcatcctaagttattgaattgattggtccctgctcccctctttggttcaaggggcgctgaggaaggggcctggacacaaagacctctgtgccccgaagagcttgggatccagagtgcttagagatcctgagatgagggccctgacccccagtgaagccaccaaggggaagggtctggtgggccccgaggaatttaactgctattttttgaggcatgaaaaggatttggagagggggagctgaattcatttgcttttgtctgtcgctagctctgggggccaccggggaaggaggagggagcccatcccatgggaacggcctgagaattcccacttccccagaatcctctccttctcagaccctccagatggtggcttggacaatggcagcaattagcatgagaatcggtcccccacacagaggatgaggtcattggcctggggtgggaggaggaggctagcctaagccttgtgtgggtgtgtgtagggcaatgtccgactgtgtgggaatctgcttctatgtctgagctctgctgtgtatcccaaatacagtgtgactttgtgtgaccaagtgtgtgatgtctgtgggtatgtgactgtgtgatttcaccctgagtgtggcttttgtgtgacagtgtcaaatgaagaggaagcctgcagggcctggatggtgcaagctcagcctgagttgtccccagctggcttgctgcctgcaggcctgggggcagagggctgaccccactttccctctgtcctctccaggaccctcctggaggctgagaactcccggctgcaaacacctggcggtggctccaagacttccctcagctttcagggtaagaggaggggccaagttcccccagaaactaccctgctttgctcttcatacccagacctatctttcccgagaggcaccaatctaaatttcaagtccgtggcctccagtgtcagtgagcatgctctcagcccagccatgggcgccaggggcaggcgcatggatactcttgccagcggtggctgctctgtggctcccctcattgccagtgatatactgatgctgtttcttccccctctgcctttccagaccccaagctggagctgcaattccctaggaccccagagggccggcgtcttggatctttgctcccagtcctgagcccaacttccctcccctcacccttgcctgctacccttgagacacctgtgccagcctttcttaagaaccaagaattcctccaggcccgtacccctaccttggccagcacccccatcccccccacacctcaggcaccctctcctgctgtagatgcagagatcagagcccaggatgctcctctctctctgctccagacacagggtgggaggaaacaggctccagagcccctgcgggctgaagccagggtggccattcctgccagcgtcctgcctggaccagaggagcctgggggccagcggcaagaggccagtacaggccagtccccagaggaccatgcctccttggcaccacccctcagccctgaccactccagtttagaggctaaggatggagaatccggtgggtctagagtgttcagcatatgccgaggggaaggtgaagggcaaatctgggggttggtagagaaagaaacagccatagagggcaaagtggtaagcagcttgcagcaggaaatatgggaagaagaggatctaaacaggaaggaaatccaggactcccaggttcctttggaaaaagaaaccctgaagtctctgggagaggagattcaagagtcactgaagactctggaaaaccagagccatgagacactagaaagggagaatcaagaatgtccgaggtctttagaagaagacttagaaacactaaaaagtctagaaaaggaaaataaagagctattaaaggatgtggaggtagtgagacctctagaaaaagaggctgtaggccaacttaagcctacaggaaaagaggacacacagacattgcaatccctgcaaaaggagaatcaagaactaatgaaatctcttgaaggtaatctagagacatttttatttccaggaacggaaaatcaagaattagtaagttctctgcaagagaacttagagtcattgacagctctggaaaaggagaatcaagagccactgagatctccagaagtaggggatgaggaggcactgagacctctgacaaaggagaatcaggaacccctgaggtctcttgaagatgagaacaaagaggcctttagatctctagaaaaagagaaccaggagccactgaagactctagaagaagaggaccagagtattgtgagacctctagaaacagagaatcacaaatcactgaggtctttagaagaacaggaccaagagacattgagaactcttgaaaaagagactcaacagcgacggaggtctctaggggaacaggatcagatgacattaagacccccagaaaaagtggatctagaaccactgaagtctcttgaccaggagatagctagacctcttgaaaatgagaatcaagagttcttaaagtcactcaaagaagagagcgtagaggcagtaaaatctttagaaacagagatcctagaatcactgaagtctgcgggacaagagaacctggaaacactgaaatctccagaaactcaagcaccactgtggactccagaagaaataaatcagggggcaatgaatcctctagaaaaggaaattcaagaaccactggagtctgtggaagtgaaccaagagacattcagactcctggaagaggagaatcaggaatcattgagatctctgggagcatggaacctggagaatttgagatctccagaggaggtagacaaggaaagtcaaaggaatctggaagaggaagagaacctgggaaagggagagtaccaagagtcactgaggtctctggaggaggagggacaggagctgccgcagtctgcagatgtgcagaggtgggaagatacggtggagaaggaccaagaactggctcaggaaagccctcctgggatggctggagtggaaaatgaggatgaggcagagctgaatctgagggagcaggatggcttcactgggaaggaggaggtggtagagcagggagagctgaatgccacagaggaggtctggatcccaggcgaggggcacccagagagccctgagcccaaagagcagagaggcctggttgagggagccagtgtgaagggaggggctgagggcctccaggaccctgaagggcaatcacaacaggtgggggccccaggcctccaggctccccaggggctgccagaggcgatagagcccctggtggaagatgatgtggccccagggggtgaccaagcctccccagaggtcatgttggggtcagagcctgccatgggtgagtctgctgcgggagctgagccaggcccggggcagggggtgggagggctgggggacccaggccatctgaccagggaagaggtgatggaaccacccctggaagaggagagtttggaggcaaagagggttcagggcttggaagggcctagaaaggacctagaggaggcaggtggtctggggacagagttctccgagctgcctgggaagagcagagacccttgggagcctcccagggagggtagggaggagtcagaggctgaggcccccaggggagcagaggaggcgttccctgctgagaccctgggccacactggaagtgatgccccttcaccttggcctctggggtcagaggaagctgaggaggatgtaccaccagtgctggtctcccccagcccaacgtacaccccgatcctggaagatgcccctgggcctcagcctcaggctgaagggagtcaggaggctagctggggggtgcaggggagggctgaagccctggggaaagtagagagcgagcaggaggagttgggttctggggagatccccgagggcccccaggaggaaggggaggagagcagagaagagagcgaggaggatgagctcggggagacccttccagactccactcccctgggcttctacctcaggtcccccacctcccccaggtgggaccccactggagagcagaggccaccccctcaaggggagactggaaaggagggctgggatcctgctgtcctggcttccgagggccttgaggccccaccctcagaaaaggaggagggggaggagggagaagaggagtgtggccgtgactctgacctgtcagaagaatttgaggacctggggactgaggcaccttttcttcctggggtccctggggaggtggcagaacctctgggccaggtgccccagctgctactggatcctgcagcctgggatcgagatggggagtccgatgggtttgcagatgaggaagaaagtggggaggagggagaggaggatcaggaggaggggagggagccaggggctgggcggtgggggccagggtcttctgttggcagcctccaggccctgagtagctcccagagaggggaattcctggagtctgattctgtgagtgtcagtgtcccctgggatgacagcttgaggggtgcagtggctggtgcccccaagactgccctggaaacggagtcccaggacagtgctgagccttctggctcagaggaagagtctgaccctgtttccttggagagggaggacaaagtccctggccctctagagatccccagtgggatggaggatgcaggcccaggggcagacatcattggtgttaatggccagggtcccaacttggaggggaagtcacagcatgtgaatgggggagtgatgaacgggctggagcagtctgaggaagtggggcaaggaatgccgctagtctctgagggagaccgagggagcccctttcaggaggaggaggggagtgctctgaagacctcttgggcaggggctcctgttcacctgggccagggtcagttcctgaagttcactcagagggaaggagatagagagtcctggtcctcaggggaggactaggaaaagaccatctgcccggcactggggacttaggggtgcggggaggggaaggacgcctccaagcccgctccctgctcaggagcagcactcttaacttacgatctcttgacatatggtttctggctgagaggcctggcccgctaaggtgaaaaggggtgtggcaaaggagcctactccaagaatggaggctgtaggaatataacctcccaccctgcaaagggaatctcttgcctgctccatctcataggctaagtcagctgaatcccgatagtactaggtccccttccctccgcatcccgtcagctggaaaaggcctgtggcccagaggcttctccaaagggagggtgacatgctggcttttgtgcccaagctcaccagccctgcgccacctcactgcagtagtgcaccatctcactgcagtagcacgccctcctgggccgtctggcctgtggctaatggaggtgacggcactcccatgtgctgactccccccatccctgccacgctgtggccctgcctggctagtccctgcctgaataaagtaatgcctccgcttcaaa

SEQ ID NO: 91 - DNA, 9359 bp, Mus musculus strain C57BL/6J
cgctgggtcactgtcgccgctactccctttctcccccttaaaagctccaagggccactcccttctctagtgctccacgtccgcttgccctcggggggccagaccagcgacatggagggttgcgtcggggaagaatcttttcagatgtgggagctcaatcgacgcctggaggcctacctgacccgggtcaagacgctggaggagcagaaccagctgctcagtgccgagcttgggggactccgggcgcagtccggggacgcctcctggcgagcccgagccgacgacgagctggcagccctgcgggtcctcgtcgatcagcgctggcgggagaagcacgaggctgaggtgcagcgcgacaaccttgccgaagagctggagagcgtggcgggccggtgccagcaggtgcggctcgcccgggagcggaccatcgaggaggcggcctgcagccggcgcgcgctcgaggcggagaagaatgcgcggggctggctgagcacccaggctgccgagctggagcgcgagttagaggctctgcgagcgtcgcacgaggaggagcgcgcgcacctgaacgcccaggccgcctgtacgccgcgccgaccccccgcgccggcccacgcatcccccatccgggcccctgaagtcgaggagctggccaggcgcctaggcgaagtgtggcgcggggcggtgcgtgactaccaggagcgcgtggctcacatggagagctcgctgggccaggcccgcgagcgtctgggccaagccgtgcggggcgctcgggagagtcgcttagaggtgcagcagctgcaggctgatcgcgacagcctccaggagcgcagagaggcgctggaacagagattggaaggccgctggcaggaccggctgcaggccactgaaaagttccaggtgaggagggtcaccaacacgcccaccctgtccctggtaaaaccaagccctaggaggtacttaggatggcaagagaccttcaggaaaggggtgggggcaaggacaactgtattcaggagtccttgctcagagcaagcacaagtcctagacttccctgtccagacaggcaggatggatggaattctgagacctcctagcacagcccccttgaaaggcccgcaggccaatacccactgtagctgctcctcactctttgaatggcaacccctctctagggtgactccctgtgcccttcactatgcagttgtcaatcagaaggtgcccaacacatgctctctccccaccagaaggttcctagcaaccatagtgaaggaaggcagtgtgagccaccgcagaccaccagcccctctctgtgtcaaggcttctcagctccctgaagcgcattccaaaggcctggggcaccctccccctcatattgcacagatgtgaccaacagctgagaaaacagcctcttgcctggcccagacagaagtcccgacgtgaccacctgcccactcttcttgggggagaaggattccagaacaagtgggaagtggaggaacccagcctgctatgaggagccgggggcagtggtggcccagctgctttccttccaagccttctcgaggcgactcttgataaattgctttttccttctgtttccactttgcctcctcttccgctgtgtaacccatctcctctcctttatcccatctcctcccgtgggagctaggttctcaatagcatgtgttaccatttaaccagcatcctaagaagaagcctggtctatctaggagaggcctggagtgtttcctgtgcttgtccgggggtccagcacagtgctccagacagggagaacgcaggtagaggaacaggactctgccctacaaagatgtgagcagtgaagagagtcatggcccagagcagaggcccctcccactcactctgccggcttgctttgcagctggctgtggaagccctggagcaggagaagcagggtctacagagtcagatcgctcagatcctggaaggtgggcagcaactggcacacctcaagatgtcccttagtctggaagtggctacatacaggtacacagtactgactgtctccttggctgaagggccccgaaacttgaccctgtaaaactgttctatttacgtgtatttgtgtataggccccatgtgtccaggtgtcttaagagcccagaagacactgggtcccttgcagctggagttataggctgtgagcagctccacactggtgctgtgagccacacccctgttctctgcaagggcagcaagcactcttaaccactgagccatctgtccagccctcagatccacttaaaactttttattacatgtatttatgtaatgtttttgtctgtgatggaggcttatgagtcccagagatcaaagaggttgtctggcttggcagcttggtaggcataaacttgagcccacctgctcccaggttcgggactagaagagatggttatgcttaaagagacaactcagtcttcagggaggagaccagagggtacagtcacctgctctcgagttctttgaaaggcaggcaatctccagtgtctatgccagatcccagggacacctgggcggtctcaggaaagagaccttgcaggattgcctggtcgtgctcaccggtcccctagcccgggcctcagctgtgtctggggtaagagctgggcgcctagccttctgccttcctttcaagccctcgtgtcactggccctgcccagctcctgttgcccctttcttggctgcctcaggaaggctgagtggaacagctgtgggtagtttgtgtccagcctctgtctgtcagaagaggtcccggctggagtcccactgttgagggctgaggatatcccgccagagtatggggccaggacaggatgtcgcccttctccagaatccactggcaaagaggcaagaccagagacagatctaggagaggagctggagggtagagtccagagaagggaagccagtgagtgtctaggaaggactgaatgcacaaggcaggacactatgaggacggaggaaaggctattttgagaaccagatgtgctcagaggccatgaatggaaacaagggactagctccgaatcccttgtgaactgattcccctcatctcctcccatcagctgtgaacctaaagacctctggcctgaaggaggatttgtgatcctaagatgagggccttcgccccagtcagtcttctgaggcgaggggaagggtccaggcagctctgaggaatgtaagcactggtgtttgcggtctgaaaaggatttggagaaggagagctgaattcatttgcttttgtctgtcaccagctctgggggcctaggagagagccatcccatgggaacagcctgagaattcccacttcccctgaggagcccctccttctcaggccctccagatggtagtgtggacaaaaggcaataattagcatgagaatcggcctccctctccgaggatgaggtcatcggccttggccttgggtggggaggcggagactgatctgaggagtctgatcgaagtgttagcaattcacttggccctgcttccgaatgtgggaatctgcgtgtggggtctccctgagtctcaaatatgggttcaccaagtatatatctgtgggtatatgactgtgtggctttcatacgacaatggtcacaataaagagtgatcctgcagtggcaggacatgcaacctcagctgggcctgaccccatcgcctcccctcccccccaggactctgctggaggctgagaactctcgcttgcagacacctggaagaagttcccaggcttctcttggctttcctggtaagaggcggagccaactgctcctggacgctctccttccacatcttccctaagcagcatcagtccaagtcttcactccctggtccccacagtactgatgtccccagtctaagcagtgggggtcggataaaatggctgaaatgagggctgctctgggtgaagtcaggacatacttacagtgtttcttttcttttttaagatttatttattttatgtatatgagtatactatagctgtacagatggttgtgaaccttcgtgtgattgttgggaattgaatttaggacctctgctggctccagtctgccctgctcgctcagtccctatgcactctggcccaaagatttatttattattataaataagtacactgttgctgtcttcagacatactagaagaaggcgtgagatctcattacgggtggttgtgagccaccatatggttgctgggatttgaactcaggaccttcggaagaacagtcagtgcccttacccgctgagccatctcgccagcccacttacagtgtttcttactctgcttttccagaccccaagctgaagctgcatttccttgggataccagaggaccagcacctgggatctgtgctccctgtcctcagcccaacatccttctcttcccccttgcctaatacccttgagactcctgtgacagcctttctgaagacacaggaattccttaaggccagaacccccaccttggccagcactcccatcccacctatgtctgaggctccctatcctaaaaatgcagaggtcagagcccaggatgtcccccattccctgctccagggtgggaggcaacaggctccagagcctctttgggctgaggccacagtgcccagttctactggtgtcctcccagagctggaggagcctgggggcgagcagccggaccacttccctgatgatccaacctccttagccccacccctcaaccctcaccactctattttagaggctaaagatagagaatccagtgagtctagagtttctagcatattccaggaagaagaagggcaaatctgggaacttgtaaagaaagaagcagccacagaggtaaaagtagaaaacagcttagcacaggaaatacaagaaagtggtctggacacagaagaaatccaggattcccagggacctttgcagatggaaaccctggaggctctaggagatgagccactgatgtctctgaaaacccagaaccatgagaccccaggaaaggagaattgcaattcatctatagaagagaactcggggacagtaaaaagcccagaaaaagaaaaacaaacaccactgaagtctttagaagaaaagaatgtagaggcagagaaaactctagaaaatggggttcttgaactatctaaacctttaggagaagaagaaccaagaatggaggatcaagaattaatgtctcctgaacacacactagagacagtttcatttctaggaaaggaaaatcaggaagtagtgaggtcttcagaagaacagaacttagaatcattgataacttttaaagaggagagccaatacccactgggaggtccagaagccgaggaccagatgcttgaaagactggtagagaaagaggatcagaggttcccaaggtctccagaagaagaccagcaggcgtttagacctctggagaaagagaatcaggagccactaagatttgaagaagcagaggaccaggtgcttgagagactgatagaaaaggaaaggcaggagtccctgaagtctccagaagaagaggaccagcaggcatttagacttctggagaaagagaatcaagaaccactaaggtttgaagacgcagaggaccaggtgcttgagagactgatagaaaaggaaagacaggagtccctgaagtctccagaagaagaggaccagcaggcatttagacttctggagaaagagaatcaagaaccactaaggtttgaagaagcagaggaccaggtgcttgagagactggtagaaaaggaaagtcaggagtccctgaagtctccagaagaggaggaccagaggactgggaagcctctagaaaaagaaaatcaggaatctctgaggtctcttgatgaaaaccaggagacaattgtactgctagaaagcaagaaccagaggccactgagatctctagaagtagaagaggaggagcagagaattgtgaaacctctagaaaaagtgagccaggtctccctcgaatctctcgaaaaagagaatgtgcagtcaccaaggtatctggaagaagatgaccacatgattaagagcctgctagaagacaagactcatgagatcctgggatctcttgaagatagaaatggggagaactttataccacctgaaaatgagacccagggttcattgaggcctccagaagaagaggaccagaggattgtgaaccatctagaaaaagaaagccaggagttcctgaggtctccagaagcagaggaagaagaagagcaggtgatggtgagatctctagaaggagagaaccacgacccactgagctctgtggtgaaagaggagcagatggctgagagcaagctagagaacgagagtcaggactccaggaagtctcttgaagatgagagccaggagacctttgggtctctggaaaaagagaatctagagtccctgaggtctctagcaggacaggaccaagaggaacagaaactcgaacaagagacccagcagccactgagggctgtagaagatgagcagatgacagtgaaccctccagaaaaggtggatccagagttaccaaagcctcttagaaatgaccaggaagtagtcagatctcttgacaaggagaatcaagagtcactagtgtcactgaatgaaggaggtatggagacagtgaagtcttcagaaacagagaacatagaatcactggagactgtgggagagtgcctgggaagaaggaagtctgtagatactcaagagccattgtggtctacggaagtgactagtgagacaatagaacctctagaagatgagacccaagaaccactggggtgtgtggatgagaaccaagaggtgctgacaccccttgaaagggagagtcaagaactgagatctctgggcaagtggaacccagagactgtggaatcaccaggaggggtggaggacagtcagcagtgcctggaagtggaagagggcccggagagggagcagcaccaagagtctctgaggtctctgggagaggtggaatgggagctgcctggatctggaagtcaacagaggtgggaggatgtggtggaggatggagaaggtcaggaagcatccctgggggctacaggagtggaaactgaggataaggcagagttgcatctgaggggccaaggtggggaggagaaagctgtagaggagggagagctgctgcaggatgctgtgggggaggcctggagtctggggagctcggagcccaaggagcagagggtccctgctgagcccctcgatgacctggagggacaaccagagcagacgggaaccctagaggtcccagttgctcagggaatgccagaggcaacagagcaagatgaggacagagcccaagcaggtgaacaagactccgtagaggtgacccttgggttagaggctgccagagctggactggaactcgagcaggaagtggtagggctagaggacccaaggcatttcgccagggaggaggccattcacccatccctgggggaggaaagtgtgaaggcaaagatagatcagggcttggaagagcctggaaaggaaccaaaagaggcaggtgctctggactcaggcatccctgaattacccaagactagcagtgagactctggaatgcaagggctgggaagagtctggggagggctggggagaagaggaggcctcgctggagacctcagaccatgagggcagccatgcccctcagcccaggccccctaagacagaggaagatgagggtctacaggcagcgctaacagtccctggtcccaagctcctggaaccctgttcacccatcccgatcttgacagatgcccatgagctgcagccccaagctgaggggatccaggaggctgggtggcagccggaagctgggactgaagcactgggaagagtagaagatgagccagagtttggtcgtggggagattcctgagggcctccaggattgggaggagggcagagaagacagtgaggcagatgagttaggggaaactctccctgactctactcccttgggcctctacctgaagtctcctgcctccccaaagtgggagcaagctggagaacagaggcttttccctcaaggggaggccaggaaggaaggctggagtcctgctgccctggctgcccagggtctcagtgacccaccagaggaagagcagcaaggccatgactctgacctctcatctgaggaatttgaggacctagggactgaggcctctcttcttccaggggttcccaaagaggtgtccgatcatctgggccaagagccccccgtactgcagcctgcatgctgggatcagggtggggagtctgatgggtttgctgatgaggaagagagtggggaagagggagaggaagaagatgctgatgaagaagaaggagcagagtcagggactcagtggtgggggccagggccctctggtggaggtgtcaaggtccaggatgtcacccagagaggggacctggaacatgaatctgtgggtgacagtggcctctgggatgatggcttgagtggggctgcagctaatgttcttgtaactgccctagagacggtgtctcaggacagtgctgagccttccgggtcagaggggtctgagtctgcttccttggagggggaggaaggtcaagcgattgaccatttagatgccccccaagaggtgactagcgtggtcccaggggcaggagacacctttgatatcagtggccagggccccaacctggagtcagagcaagtgaatgggaggatggagaatggactagagcaggctgagggtcaggtggttctgcatggggacgaggatcaaggcatccctttacaggaacagggtaccctcaaggcccctttagtagggtctcctgtgcatctaggcccaagccagccgctgaagttcactctgagtggggtagatggagactcctggtcctcaggggaagattagaaactgcccctctggcactgaggacttagtggggggtggggggaatgtccctccctgctctgggccagcactcttagctttgataacttgacctgtggtatctctcgtggagaggtgtggctggctgagacaggtgagatcctgcctggatcaccctgaaggctcaggtcagctgagcctatagttcaacgccccctttcttctgtggctcacctgctggaagaggcttgggcccagagctttcccacgagactgctctggccagagcttgctagccctgcctgtctacagtagcaccacctgcacagggtctggtgcatgcccagaggagcagcaatgatgagtgactctcatcatctcagcctgctgagatcttgtttctctcttcctcccttgaataaagctgtatccctacctacaa

SEQ ID NO: 92 - DNA, 8657 bp, Pan troglodytes
  misc_feature (8462)..(8462): n is a, c, g, or t
  misc_feature (8476)..(8476): n is a, c, g, or t
tcccactcccgactctcagtcgctcaggctactcccaccccgccccgccccgtcattgtccccgtcggtctcttttctcttccgtcctaaaagctctgcgagccgctcccttctcccggtgccccgcgtctgtccatcctcagtgggtcagacgagcaggatggagggctgcatgggggaggagtcgtttcagatgtgggagctcaatcggcgcctggaggcctacctggcccgggtcaaggcgctggaggagcagaatgagctgctcagcgcggagctcggggggctccgggcacaatccgcggacacctcctggcgggcgcgtgccgacgacgagctggcggccctgcgggccctcgttgaccaacgctggcgggagaagcacgcggccgaggtggcgcgcgacaacctggctgaagagctggagggcgtggcaggccgatgccagcagctgcggctggtccgggagcggacgacggaggaggtagcccgcaaccggcgcgccgtcgaggcagagaaatgcgcccgggcctggctgagtagccaggcggcagagctggagcgcgagctagaggctctacgcgtggcgcacgaggaggagcgcgtcggcctgaacgcgcaggctgcctgtgccccccgctgcccagcgccgccccgcgggcctcccgcgccggccccggaggtggaggagctggcaaggcgactgggcgaggcgtggcgcggggcagtgcgcggctaccaggagcgcgtggcacacatggagacgtcgctgggccaggcccgcgagcggctgggccgggcggtgcagggtgcccgcgagggccgcctggagctgcagcagctccaggctgagcgcggaggcctccaggagcgcagggcagcgttggaacagaggttggaggaccgctggcaggagcggctgcgggctactgaaaagttccaggtgaggaggttgagggcctgggtgagagaaagtcccagaacgctccagaaagtcccttatgaagctcagagaccttctgggaagggagtggggctagctggctgctgaatcaggagccagttctcagaaacctggtgccacacgtcctagacttttacagcccgtctagtgtaggatgcgaatggtggggcttctcgaagcacatcccgggtgggcagtcaggcccaagacccgttgcagcagccccgccactctctggatggcaccttctggctctgatgatgactggggctccgggccccttcccaggctctggtattactaggaggacacccagcactgtcgcctctgcgctgaatctggtggcctggccactcagaatcaccaagttcctcacagccctcctccccctgaggggaggagtgaggggccgtgaatgaatggctaccagccccctcccatgccatggcttctcggctccctggagcacattccagaggcccataacagctgctccttctcacagggcacagatgtgaccagcagctgagaaaacagcttcttgcctgggccacacagaggtgccatggccacctccccatccctcctctcagaggagagagaatccagaacatgtgggaagtgggggtggggcgggggtgagagcctgctgtgaggagcaggagacagctgtgggagatgggaccaatgggggacaggggctgtttgccttccagtcctgcaggctccagccatcttgattaatcgtttttccttctgcttttgcttttttttcccctcttctctctccataacccatctcgtctcctccctcacctccccttcctgtgggagctgtgttctgagcaacatgtgctaccatttaatcagcatcctcagaggaggagcaggccatgggagagagctgagagggctgacaggggccctgggctcatcttggctgatccagagggggctctctgggcagggaatagggtaggggaggcgggggtctgctacacagataagtcagccagggagcaggaggtgcttcccgggcagcggcagcgggcaggatgcaggttggttcacagaagggaccccagcccctccactgactgcctctcgcctgccctgcagctggctgtggaggccctggagcaggagaaacagggcctacagagccagatcgctcaggtcctggaaggtcggcagcagctggcgcacctcaagatgtccctcagcctggaggtggccacgtacaggtacgagacgagccctgtccacccaggcacgcagaggcacacacacatgctggggcagactacgtggctgaaggggaccagaggtgtaggtgatggcaactctgctgccactgggttctgtgactctaggctggtcacttccacaccggaacatgtcctgcctgaaaccatctgctcccccataggctggagacctgagaaatgtcctgtgcccgggaaatccccccaggagagatgatattgccgagcgggacagcctctggagaggggctgggcccgtgtggggcaactgcatccagacccttcccccaaggggcaaagctccaactctatgtgtgcccacacccagggggtcatgtcctttggcagccacggaaaggaggcattgcaggcatggggtggctgcactgacttgccacctgacctgggcctcagcctcgtctaggggctgagggctgggctgggggacttccaaggcctcttctagcctggatgtcatggggccagactcctctgatgcccctagtgcccttggtcctgcccagcccttcattgtccacattttctgttatcctagaaatggctgagaccaaggaggggtggcttctcacttgctatgtggccttgggcaaagcccgcagtctcttctgggaaactggtcctgttggctgaggggccattgatggggcctgaggaaggggctctgtggctggtgaggggccacatgagatccaggaaaggaggggaggcaaggcccagagatggaaggtcagtgaggctctggggaggacgtggaggagaggggctccaccgccagggaagagaagcccagaaggaaggccgcagcactggcaaggacagaggtgaggctacagcgagtgctaaccagactcagagatcatggagcaaagcagagaggagcagctgctcatcctaagttattgaattgattggtccctgctcccctctttggttcaaggggcgctgaggaaggggcctggacacaaagacctctgtgccccgaagagcttgggatccagagtgcttagagatcctgagatgagggccctgacccccagtgaagccaccgaggggaagggtctggtgggccccgaggaatttaactgctattttttgaggcatgaaaaggatttggagagggggagctgaattcatttgcttttgtctgtcgctagctctgggggccaccggggaaggaggagggagcccatcccatgggaacggcctgagaattcccacttccccagaatcctctccttctcagaccctccagatggtggcttggacaatggcagcaattagcatgagaatcggtcccccacacagaggatgaggtcattggcctggggtgggaggaggaggctagcctaagccttgtgtgggtgtgtgtagggcaatgtccgactgtgtgggaatctgcttctatgtctgcgctctgctgtgtatcccaaatacagtgtgactttgtgtgaccaagtgtgtgatgtctgtgggtatgtgactgtgtgatttcaccctgagtgtggcttttgtgtgacagtgtcaaatgaagaggaagcctgcagggcctggatggtgcaagctcagcctgagttgtccccagctggcttgctgcctgcaggcctgggggcagagggctgaccccactttccctctgtcctctccaggaccctcctggaggctgagaactcccggctgcaaacacctggcggtggctccaagacttccctcagctttcagggtaagaggaggggccaagttcccccagaaactaccctgctttgctcttcatacccagacctatctttcccgagaggcaccaatctaaatttcaagtccgtggcctccagtgtcagtgagcatgctctcagcccagccatgggcgccaggggcaggcgcatggatactcttgccagcggtggctgctctgtggctcccctcattgccagtgatatactgatgctgtttcttccccctctgcctttccagaccccaagctggagttgcaattccctgggaccccagagggccggcgtcttggatctctgctcccagtcctgagcccaacttccctcccctcacccttgcctgctacccttgagacacctgtgccagcctttcttaagaaccaagaattcctccaggcccgtacccctaccttggccagcacccccatcccccccacacctcaggcaccctctcctgctgcagatgcagagatcagagcccaggatgctcctctctctctgctccagacacagggtgggaggaaacaggctccagagcccctgcgggctgaagccagggtggccattcctgccagcgtcctgcctggaccagaggagcctgggggccagcggcaagaggccagtacaggccagtccccagaggaccatgcctccttggccccacccctcagccctgaccactccagtttagaggctaaggatggagaatccggtgggtctagagtgttcagcatatgccaaggggaaggtgaagggcaaatctgggggttggtagagaaagaaacagccatagagggcaaagtggtaagcagcttgcagcaggaaatatgggaagaagaggatgtaaacaggaaggaaatccaggactcccaggttcctttggaaaaagaaaccctgaagtctctgggagaggagattcaagagtcgctgaagactctggaaaaccagagccatgagacactagaaagggagaatcaagaatgtccgaggtctttagaagaagacttagaaacactaaaaagtctagaaaaggaaaataaagagctattaaaggatgtggaggtagtgagacctctagaaaaagaggctgtaggccaacttaagcctacaggaaaagaggacacacagacattgcaatccctgcaaaaggagaatcaagaactaatgaaatctcttgaaggtaatctagagacatttttatttccaggaaaggaaaatcaagaattagtaagttctctgcaagagaacttagagtcattgacagctctggaaaaggagaatcaagagccactgagatctccagaagtaggggatgaggaggcactgagacctctgacaaaggagaatcaggaacccctgaggtctcttgaagatgagaacaaagaggcctttagatctctagaaaaagagaaccaggagccactgaagactctagaagaagaggaccagagtattgtgagacctctagaaacagagaatcacaaatcactgaggtctttagaacaacaggaccaagagacattgagaactcttgaaaaagagactcaacagcgacggaggtctctaggggaagaggatcagatgacattaagacccccagaaaaagtggatccagaaccactgaagtctcttgaccaggagatagctagacctcttgaaaatgagaatcaagagttcttaaagtcactcaaagaagagagtgtagaggcagtaaaatctttagaaacagagatcctagaatcactgaagtctgcaggacaagagaacctggaaacactgaaatctccagaaactcaagcaccactgtggactccagaagaaataaatcaggggacaatgaaacctctagaaaaggaaattcaagaaccactggagtctgtggaagtgaaccaagagacattgagactcctggaagaggagaatcaggaatcattgagatctctgggagcatggaacctggagaatttgagatctccagaggaggtagacaaggaaagtcaaaggaatctggaagaggaagagaacctgggaaagggagagtaccacgagtcactgaggtctgtggaggaggagggacaggagctgctgcagtctgcagatgtgcagaggtgggaagatacggtggagtaggaccaagaactggctctggaaagccctcctgggatggctggagtggaaaatgaggatgaggcagagctgaatctgagggagcaggatggcttcactgggatggaggaggtggtagagcagggagagctgaatgccacagaggaggtctggatcccaggcgaggggcacccagagagccctgagcccaaagagcagagaggcctggttgagggagccagtgtgaagggaggggctgagggcctccaggaccctgaagggcaatcacaacaggtggtggccccaggcctccaggctccccaggggctgccagaggcgatagagcccctggtggaagatgatgtggccccagggggtgaccaagcctccccagaggtcatgttggggtcagagcctgccatgggtgagtctgctgcgggagctgagccaggcccggggcagggggtgggagggctggaggacccaggccatctgaccagggaagaggtgatggaaccacccctggaagaggagagtttggaggcaaagagggttcagggcttggaagggcctagaaaggacctagaggaggcaggtggtctggggacagagttctccgagctgcctgggaagagcagagacccttgggagcctcccaagggtagggaggagtcagaggctgaggcccccaggggagcagaggaggcgttccctgctgagaccctgggccacactggaagtgatgccccttcaccttggcctctggggtcagaggaagctgaggaggatgtaccaccagtgctggtctcccccagcccaacgtacaccccgatcctggaagatgcccctgggcctcagcctcaggctgaagggagtcaggaggctagctggggggtgcaggggagggctgaagccctggggaaagtagagagcgagcaggaggagttgggttctggggagatccccgagggcctccaggaggaaggggaggagagcagagaagagagcgaggaggatgagctcggggagacccttccagactccactcccctgggcttctacctcaggtcccccacctcccccaggtgggaccccactggagagcagaggccaccccctcaaggggagactggaaaggagggctgggatcctgctgtcctggcttccgagggccttgaggccccaccctcagaaaaggaggagggggaggagggagaagaggagtgtggctgtgactctgacctgtcagaagaatttgaggacctggggactgaggcaccttttcttcctggggtccctggggaggtggcagaacctctgggccaggtgccccagctgctactggatcctgcagcctgggatcgagatggggagtccgatgggtttgcagatgaggaagaaagtggggaggagggagaggaggatcaggaggaggggagggagccaggggctgggcggtgggggccagggtcttctgttggcagcctccaggccctgagtagctcccagagaggggaattcctggagtctgattctgtgagtgtcagtgtcccctgggatgacagcttgaggggtgcagtggctggtgcccccaagactgccctggaaacggagtcccaggacagtgctgagccttctggctcagaggaagagtctgaccctgtttccttggagagggaggacaaagtccctggccctctagagatccccagtgggatggaggatgcaggcccaggggcagacatcattggtgttaatggccagggtcccaacttggaggggaagtcacagcatgtgaatgggggagtgatgaacgggctggagcagtctgaggaagtggggcaaggaatgccgctggtctctgagggagaccgagggagcccctttcaggaggaggaggggagtgccctgaagacctcttgggcaggggctcctgttcacctgggccagggtcagttcctgaagttcactcagagggaaggagatagagagtcctggtcctcaggggaggactaggaaaagaccatctgcccggcactggggacttaggggtgcggggaggggaaggatgcctccaagcccgctccctgctcaggagcagcactcttaacttacaatctcttgacatacggtttctggctgagaggcctggcccgctaaggtgaaaaggggtgtggcaaaggagcctactccaagaatggaggctgtaggaatataacctcccgccctgcaaagggaatctcttgcctgctccatctcataggctaagtccgctgaatcccgatagtactaggtccccttccctccgaatcccctcagctggaaaaggcctgtggcccagaggcttctccaagggagggtgacatgctggcttttgtngcccagctcaccanccctgcgccacctcactgcagtagcgcaccatctcactgcagtagcacgccctcctgggccgtctggcctgtggctaatggaggtgacggcactcccatgtcctgactccccccatccctgccacgctgtggccctgcctggctagtccctgcctgaataaagtaatgcctctgcttcaaa

SEQ ID NO: 93 - DNA, 1940 bp, Human
agggggcggggaggggcgcagggctgcgcgctcgccggcgctctctttcggtttggtcggcggctggaggagagtggacccccccactttaaggctctgtcctcggcgcgttcccgccgccccccggtcccgacgcggggctcggggatgcccgccagcatgttcagcatcgacaacatcctagccgcccggccgcgctgcaaggactcggtgttgccggtggcgcacagcgcggcggctcccgtcgtcttcccggccctgcacggggactcgctctacggcgccagcggcggcgcctcctcggactatggcgccttctacccgcgccccgtggcccccggcggcgcgggcctcccggccgcggtcagcggctcccgcctcggctacaacaactacttctacgggcagctgcacgtgcaggcggcgcccgtgggcccggcctgctgcggggccgtgccgccgctgggcgcccagcagtgctcctgcgtcccgacgcccccaggtagggtcgcgctcgctccggcctctgccgcccactgcggtccttagcccatggagccggttggttaattcaccttcctcaaactttgctcctcttgcaactcccccctccgcttttgccgatcgggcgcaggagtttgcaaacttcttgctgcaaacttttggccagagttcgcgaaaactggaattcagtgcctgcccggggaaactgggttttgttttgttttgttttgttttgaattctcttactggctttggcgggtgtgcggatggatgctctaacacgcctcctccttttccctgcacccctgattcccgtgcacccccaattctcagcatccccttgcagacgacttctaagtggaagagggtcgggggctggcgggcgtgcatgcgtgcggtggcgagggcgggcggctgaccgtgcgccccactctgtcgcaggctacgagggccccggttcggtgctggtgtccccggtaccgcaccagatgctgccctacatgaacgtgggcacgctgtcgcgcaccgagctgcagcttctcaaccagctgcactgtcggcggaagcggcggcaccgcaccatcttcactgacgagcagctcgaagctctcgagaacctcttccaggagaccaagtacccggacgtgggcacgcgcgagcagctggcccggaaagtgcacctccgcgaggagaaagtggaggtaggcgccggggcctgccgtgggcgcctagcggtccttccccgcgaggtggggccccagtcgggtttgcccagccctgcttggctctccccgcactttaaaaacatcccgatggcggcccgcaggctgctggagggcgctttaggcccaggaagttgaatgaaaacgcggaagcgggagcgagcggctcccctccttttgttggcctgcgcggggtgtcccgccgccacaccaagctccccgggtgccccgggactgggggaagcgcgcctttgatctgaactgttttgtcctccgttgcgcaacaggtctggtttaagaaccgccgcgccaaatggaggcggcagaagcggtcctcatcagaggagtcggagaacgcggagaagtggaacaagacgtcgtcgtcgaaggcgtcaccggagaagagggaagaggaaggtaaaagcgatttggactcggacagctgacggccgcgggacacttgcccgtattacttacctaactcgaaggacttgcacagacagacgatgctactttcttgcacacgcgctgccttgcgggagggggtcgagaaagaggaacgaggagctgtaaatagtgtacagagccgggagggtcggcgtctggggtcagggcgcgcacagcccagcagcccgaggccgcccgcgactagcccccaccgtagtatttatagttaaattaagggtgacagtacaataaagtgatggcgatgta

SEQ ID NO: 94 - DNA, 2028 bp, Mus musculus strain C57BL/6J
ctcgcccgcgggagcagagagtgggacaattcccaacccccaccccaaacaacaccacttggagacttcttcttcttcggcgcgtccccgccgccccccggtcccgacgcggggctcggggatgcccgccagcatgttcagcatcgacaacatcctggccgcccggccgcgctgcaaagacgcggtgctcccggtggcgcccagcgccgcggctccggtggtcttcccggctctacacggggactcgctctacggcgccggcggcggcacctcctcggactacggcgccttctacccgcgccctgtggcccccggaggcgcgggcctcccggccgcggtcggcagctcccgcctgggctacaacagctacttctacgggcagctgcacgtgcaggcggcgcccgtgggcccggcttgctgcggggctgtgccgccgctgggcgcccagcagtgctcctgcgtcccgacgcccccaggtagggtcgcgatcgctcgcgagccggccttcgccactgcggcagtcggtggctgccggggcatggacgcgcggtttgcttgctttactcacctggcaccaactttctccctttgcaagccttccccgttctcccatttatttatttatcttttacttttaattaattaatatatttttgggtcaccgggtacggggactttgcatacgtctactgtaaactttaggttagagtttaaaaagccgagtcaccgggagtctcggggcgactccacgcgcgcgcgggaatgaagtgaggacgcggggagattctaaagtgcctgaactggcttttggatgtgtgcaggcagacgctccttccacgtctgggcatccctggtctcggtgccccccaaagacatagcgccccttgcagactttttttatttttaagtgagcgagggcagcgagcgggttggcttacggtgccgagggaggatgactgactcccgtccctctctctgtcgcaggctacgagggccccggttctgtactggtgtctccggtgccgcaccagatgctgccctacatgaacgtgggcacgctgtcgcgcactgagctgcagctgctcaaccagctgcactgtcggcggaagcggcggcaccgcaccatcttcaccgatgagcagctcgaagccctggagaacctcttccaggagacgaagtacccagacgtgggcactcgggagcagctggccaggaaggtgcaccttcgggaggagaaggtggaggtaggcaagagccccagcgggggtgggctggggtgggggcgtctagcggtccttccctgcacgcggcttttgccgggtcctcctttgggatgtggccactctaagagcatcccagaggctgtggcctggaggctgcccgagggtactttaggcccaagaaggaaaagaggaagcgtggagggtgcttctccttttgttggtcttgagcacagcgattgcctgcggatttctccctgccaggctaaggttccacggtcaggctgtcccctggccacgcggggccacccggtgccctggtgtcggtgggcagcagcctttaggtcaccactgtttggttgcgcaacaggtctggtttaagaaccgccgagccaagtggagacgacagaagcgatcctcctcggaggagtcagaaaacgccgagaagtggaacaagacgtcctcaaaagcctcgccggagaagagggaagaggaaggtaaaagcgatttggactcggacagctgacggccgcggccgcgggccggccggggcgcttgcctgacgcaaggacttgcacagacagtcgatgctacttgcacacaccctgccttgcgggagggggtcgagaaagcaacgaggagctagctgtaaataatgtacaggcccaggactgctggggacaggcgcgtggggaccgcagccccactgtcccgggctgcctgcgtgagcctcgtcccccaccgtagtatttatagttaagttaacggtgacaatacaataaagtgatggcaatgtagaccagccatg

SEQ ID NO: 95 - DNA, 1523 bp, Pan troglodytes
atgcccgccagcatgttcagcatcgacaacatcctagccgcccggccgcgctgcaaggactcggtgctgccggtggcgcccagcgcggcggctcccgtcgtcttcccggccctgcacggggactcgctctacggcgccagcggcggcgcctcctcggactatggcgccttctacccgcgccccgtggcccccggcggcgcgggcctcccggccgcggtcagcggctcccgcctcggctacaacaactacttctacgggcagctgcacgtgcaggcggcgcccgtgggcccggcctgctgcggggccgtgccgccgctgggcgcccagcagtgctcctgcgtcccgacgcccccaggtagggtcgcgctcgctccggcctctgccgcccactgcggtccttagcccatggagccggttggttaattcaccttcctcaaactttgctcctcttgcaagtcccccctccgcttttgccgatcgggcgcaggagtttgcaaacttcttgctgcaaacttttggccagagttcgcgaaaactggaattcagtgcctgcccggggagactgggttttgttttgttttgttttgtttttaattctcttactggctttggcgggtgtgcggatggatgcgctaacgcctcctccttttccctgcacccctgattcccgtgcacccccaattctcagcatccccttgcagacgacttctaagtggaagagggtcgggggctggcgggcgtgcatgcgtgcggtggcgagggcgggcggctgaccgtgcgccccactctgtcgcaggctacgagggccccggctcggtgctggtgtccccggtaccgcaccagatgctgccctacatgaacgtgggcacgctgtcgcgcaccgagctgcagcttctcaaccagctgcactgtcggcggaagcggcggcaccgcaccatcttcactgacgagcagctcgaagctctcgagaacctcttccaggagaccaagtacccggacgtgggcacgcgcgagcagctggcccggaaagtgcacctccgcgaggagaaagtggaggtaggcgccggggcctgccgtgggcgcctagcggtccttccccgcgaggtggggccccagtcgggtttgcccagccctgcttggctctccccgcactttaaaaacatcccgatggcggcccgcaggctgctggagggcgctttaggcccaggaagttgaatgaaaacgcggaagcgggagcgagcggctcccctccttttgttggcctgcgcggggtgtcccgccgccacaccaagctccccgggtgtcccgggactggggaaagcgcgcctttgatctgaactgttttgtcctccgttgcgcaacaggtctggtttaagaaccgccgcgccaaatggaggcggcagaagcggtcctcatcagaggagtcggagaacgcggagaagtggaacaagacgtcgtcgtcgaaggcgtcaccggagaagagggaagaggaaggtaaaagcgatttggactcggacagctga

SEQ ID NO: 96 - DNA, 20 bp, Artificial Sequence
  Primer
gggagcttgtgttcctcatc

SEQ ID NO: 97 - DNA, 20 bp, Artificial Sequence
  Primer
ctaccaggcgagagtgttcc

SEQ ID NO: 98 - DNA, 20 bp, Artificial Sequence
  Primer
ccagctctttgcctctctgt

SEQ ID NO: 99 - DNA, 20 bp, Artificial Sequence
  Primer
tgcctctggctcctgtagtt

SEQ ID NO: 100 - DNA, 20 bp, Artificial Sequence
  Primer
tcagcctgcatcaccagaga

SEQ ID NO: 101 - DNA, 21 bp, Artificial Sequence
  Primer
ctgcaaggacaggatgctgat

SEQ ID NO: 102 - DNA, 19 bp, Artificial Sequence
  Primer
ggatgcacaagcaggtgac

SEQ ID NO: 103 - DNA, 19 bp, Artificial Sequence
  Primer
cactggtttagctccagcg

SEQ ID NO: 104 - DNA, 20 bp, Artificial Sequence
  Primer
cggaaggctccaacatagaa

SEQ ID NO: 105 - DNA, 22 bp, Artificial Sequence
  Primer
tcaaattcagggtcatcaacaa

SEQ ID NO: 106 - DNA, 20 bp, Artificial Sequence
  Primer
aacaaaggcaccatcctcaa

SEQ ID NO: 107 - DNA, 20 bp, Artificial Sequence
  Primer
cagctcggccatattcacac

SEQ ID NO: 108 - DNA, 21 bp, Artificial Sequence
  Primer
aacaccaacaaccacaactcc

SEQ ID NO: 109 - DNA, 20 bp, Artificial Sequence
  Primer
cagcttttcctctgctgctt

SEQ ID NO: 110 - DNA, 21 bp, Artificial Sequence
  Primer
tggtgtcaagcctactccttt

SEQ ID NO: 111 - DNA, 21 bp, Artificial Sequence
  Primer
caggggaagtgttctgtctgt

SEQ ID NO: 112 - DNA, 20 bp, Artificial Sequence
  Primer
ccaacgtgtgattgtggtgt

SEQ ID NO: 113 - DNA, 20 bp, Artificial Sequence
  Primer
tcttccgatgttgtctggtg

SEQ ID NO: 114 - DNA, 20 bp, Artificial Sequence
  Primer
tgaggaatggtcgttgcttt

SEQ ID NO: 115 - DNA, 20 bp, Artificial Sequence
  Primer
tctcatggggcttttgtctc

SEQ ID NO: 116 - DNA, 21 bp, Artificial Sequence
  Primer
aactaaaggccccattgctac

SEQ ID NO: 117 - DNA, 19 bp, Artificial Sequence
  Primer
caatccccatcgtctaccc

SEQ ID NO: 118 - DNA, 21 bp, Artificial Sequence
  Primer
cccttgttcctctgcctactc

SEQ ID NO: 119 - DNA, 20 bp, Artificial Sequence
  Primer
tcatgggtgtctctgtccaa

SEQ ID NO: 120 - DNA, 20 bp, Artificial Sequence
  Primer
cgcggttctattttgttggt

SEQ ID NO: 121 - DNA, 21 bp, Artificial Sequence
  Primer
aacctccgactttcgttcttg

SEQ ID NO: 122 - DNA, 20 bp, Artificial Sequence
  Primer
agttggcgtggagactttgc

SEQ ID NO: 123 - DNA, 18 bp, Artificial Sequence
  Primer
cagggcttcatgtcctgg

SEQ ID NO: 124 - DNA, 21 bp, Artificial Sequence
  Primer
tcttcctggtccccacagttt

SEQ ID NO: 125 - DNA, 25 bp, Artificial Sequence
  Primer
gcaagaatagttctctcgggatgaa

SEQ ID NO: 126 - DNA, 21 bp, Artificial Sequence
  Primer
ccctcgacagactgaccctaa

SEQ ID NO: 127 - DNA, 22 bp, Artificial Sequence
  Primer
tcggggctaatctcactttcat

SEQ ID NO: 128 - DNA, 21 bp, Artificial Sequence
  Primer
cccctgaacggtgatactgat

SEQ ID NO: 129 - DNA, 21 bp, Artificial Sequence
  Primer
aagtcctgctttacgccattc

SEQ ID NO: 130 - DNA, 21 bp, Artificial Sequence
  Primer
aaaatggaaacggggtgactt

SEQ ID NO: 131 - DNA, 22 bp, Artificial Sequence
  Primer
ggctgcatacattgggttttca

SEQ ID NO: 132 - DNA, 21 bp, Artificial Sequence
  Primer
tgtgtctcaggggattgtagg

SEQ ID NO: 133 - DNA, 23 bp, Artificial Sequence
  Primer
agctgttttcttggaatctctcc

SEQ ID NO: 134 - DNA, 23 bp, Artificial Sequence
  Primer
catgttccagtatgactccactc

SEQ ID NO: 135 - DNA, 20 bp, Artificial Sequence
  Primer
ggcctcaccccatttgatgt
